(19) United States
(12) Patent Application Publication
(10) Pub. No.: US 2019/0012428 A1
(43) Pub. Date: Jan. 10, 2019

(54) REPEAT PROTEIN ARCHITECTURES

(71) Applicant: UNIVERSITY OF WASHINGTON, Seattle, WA (US)

(72) Inventors: Fabio PARMEGGIANI, Seattle, WA (US); TJ BRUNETTE, Seattle, WA (US); Po-Ssu HUANG, Seattle, WA (US); David BAKER, Seattle, WA (US)

(21) Appl. No.: 16/060,640

(22) PCT Filed: Dec. 16, 2016
(86) PCT No.: PCT/US16/67295

§ 371 Date: Jun. 8, 2018

Related U.S. Application Data
(60) Provisional application No. 62/268,320, filed on Dec. 16, 2015.

(51) Int. Cl. G06F 19/18; G06F 19/16; G06F 19/22; C12N 15/79

(52) U.S. Cl. CPC G06F 19/18; C12N 15/79; G06F 19/22; G06F 19/16

(57) ABSTRACT

Methods and systems for designing proteins are disclosed, as well as proteins and protein assemblies designed. A comparing device can determine a protein repeating unit that includes one or more protein helices and one or more protein loops. The computing device can generate a protein backbone structure with a copy of the protein repeating unit. The computing device can determine whether a distance between a pair of helices of the protein backbone structure is between lower and upper distance thresholds. After determining that the distance between the pair of helices is between the lower and upper distance thresholds, the computing device can generate a plurality of protein sequences based on the protein backbone structure, select a particular protein sequence of the plurality of protein sequences based on an energy landscape that has information about energy and distance from a target fold of the particular protein sequence, and generate an output based on the particular protein sequence.

### STATEMENT REGARDING FEDERALLY SPONSORED RESEARCH

[0001] This invention was made with government support under Grant No. N00024-10-D-6318/0024 awarded by the Naval Sea Systems Command, Grant No. FA9550-12-1-0112 awarded by the Air Force Office of Scientific Research, and grants CHE-1332907 and MCB-1445201 awarded by the National Science Foundation. The government has certain rights in the invention.

### BACKGROUND

[0002] A central question in protein evolution is the extent to which naturally occurring proteins sample the space of folded structures accessible to the polypeptide chain. Repeat proteins composed of multiple tandem copies of a modular structure unit¹ are widespread in nature and play critical roles in molecular recognition, signaling, and other essential biological processes². Naturally occurring repeat proteins have been reengineered for molecular recognition and modular scaffolding applications [symbol] .

### SUMMARY OF THE INVENTION

[0003] Here we use computational protein design to investigate the space of folded structures that can be generated by tandem repeating a simple helix-loop-helix-loop structural motif. 83 designs with sequences unrelated to known repeat proteins were experimentally characterized; 53 were monomeric and stable at 95° C., and 43 have solution x-ray scattering spectra closely consistent with the design models. Crystal structures of 15 designs spanning a broad range of curvatures are in close agreement with the design models with RMSDs ranging from 0.7 to 2.5 Å. Our results show that existing repeat proteins occupy only a small fraction of the possible repeat protein sequence and structure space and that it is possible to design novel repeat proteins with precisely specified geometries, opening up a wide array of new possibilities for biomolecular engineering.

[0004] In one aspect, the present invention provides polypeptides comprising or consisting of the amino acid sequence selected from the group consisting of the following multi-domain proteins, as further defined in the detailed description:

[0005] (a) SEQ ID NO:1-[SEQ ID NO:2]_{(0 or 2-19)}-SEQ ID NO:3;

[0006] (b) SEQ ID NO:7-[SEQ ID NO:8]_{(0 or 2-19)}-SEQ ID NO:9;

[0007] (c) SEQ ID NO:13-[SEQ ID NO:14]_{(0 or 2-19)}-SEQ ID NO:15;

[0008] (d) SEQ ID NO:19-[SEQ ID NO:20]_{(0 or 2-19)}-SEQ ID NO:21;

[0009] (e) SEQ ID NO:25-[SEQ ID NO:26]_{(0 or 2-19)}-SEQ ID NO:27;

[0010] (f) SEQ ID NO:31-[SEQ ID NO:32]_{(0 or 2-19)}-SEQ ID NO:33;

[0011] (g) SEQ ID NO:37-[SEQ ID NO:38]_{(0 or 2-19)}-SEQ ID NO:39;

[0012] (h) SEQ ID NO:43-[SEQ ID NO:44]_{(0 or 2-19)}-SEQ ID NO:45;

[0013] (i) SEQ ID NO:49-[SEQ ID NO:50]_{(0 or 2-19)}-SEQ ID NO:51;

[0014] (j) SEQ ID NO:55-[SEQ ID NO:56]_{(0 or 2-19)}-SEQ ID NO:57;

[0015] (k) SEQ ID NO:61-[SEQ ID NO:62]_{(0 or 2-19)}-SEQ ID NO:63;

[0016] (l) SEQ ID NO:67-[SEQ ID NO:68]_{(0 or 2-19)}-SEQ ID NO:69;

[0017] (m) SEQ ID NO:73-[SEQ ID NO:74]_{(0 or 2-19)}-SEQ ID NO:75;

[0018] (n) SEQ ID NO:79-[SEQ ID NO:80]_{(0 or 2-19)}-SEQ ID NO:81;

[0019] (o) SEQ ID NO:85-[SEQ ID NO:86]_{(0 or 2-19)}-SEQ ID NO:87;

[0020] (p) SEQ ID NO:91-[SEQ ID NO:92]_{(0 or 2-19)}-SEQ ID NO:93;

[0021] (q) SEQ ID NO:97-[SEQ ID NO:98]_{(0 or 2-19)}-SEQ ID NO:99;

[0022] (r) SEQ ID NO:103-[SEQ ID NO:104]_{(0 or 2-19)}-SEQ ID NO:105;

[0023] (s) SEQ ID NO:109-[SEQ ID NO:110]_{(0 or 2-19)}-SEQ ID NO:111;

[0024] (t) SEQ ID NO:115-[SEQ ID NO:116]_{(0 or 2-19)}-SEQ ID NO:117;

[0025] (u) SEQ ID NO:121-[SEQ ID NO:122]_{(0 or 2-19)}-SEQ ID NO:123;

[0026] (v) SEQ ID NO:127-[SEQ ID NO:128]_{(0 or 2-19)}-SEQ ID NO:129;

[0027] (w) SEQ ID NO:133-[SEQ ID NO:134]_{(0 or 2-19)}-SEQ ID NO:135;

[0028] (x) SEQ ID NO:139-[SEQ ID NO:140]_{(0 or 2-19)}-SEQ ID NO:141;

[0029] (y) SEQ ID NO:145-[SEQ ID NO:146]_{(0 or 2-19)}-SEQ ID NO:147;

[0030] (z) SEQ ID NO:151-[SEQ ID NO:152]_{(0 or 2-19)}-SEQ ID NO:153;

[0031] (aa) SEQ ID NO:157-[SEQ ID NO:158]_{(0 or 2-19)}-SEQ ID NO:159;

[0032] (bb) SEQ ID NO:163-[SEQ ID NO:164]_{(0 or 2-19)}-SEQ ID NO:165;

[0033] (cc) SEQ ID NO:169-[SEQ ID NO:170]_{(0 or 2-19)}-SEQ ID NO:171;

[0034] (dd) SEQ ID NO:175-[SEQ ID NO:176]_{(0 or 2-19)}-SEQ ID NO:177;

[0035] (ee) SEQ ID NO:181-[SEQ ID NO:182]_{(0 or 2-19)}-SEQ ID NO:183;

[0036] (ff) SEQ ID NO:187-[SEQ ID NO:188]_{(0 or 2-19)}-SEQ ID NO:189;

[0037] (gg) SEQ ID NO:193-[SEQ ID NO:194]_{(0 or 2-19)}-SEQ ID NO:195;

[0038] (hh) SEQ ID NO:199-[SEQ ID NO:200]_{(0 or 2-19)}-SEQ ID NO:201;

[0039] (ii) SEQ ID NO:205-[SEQ ID NO:206]_{(0 or 2-19)}-SEQ ID NO:207;

[0040] (jj) SEQ ID NO:211-[SEQ ID NO:212]_{(0 or 2-19)}-SEQ ID NO:213;

[0041] (kk) SEQ ID NO:217-[SEQ ID NO:218]_{(0 or 2-19)}-SEQ ID NO:219;

[0042] (ll) SEQ ID NO:223-[SEQ ID NO:224]_{(0 or 2-19)}-SEQ ID NO:225;

[0043] (mm) SEQ ID NO:229-[SEQ ID NO:230]_{(0 or 2-19)}-SEQ ID NO:231;

[0044] (nn) SEQ ID NO:235-[SEQ ID NO:236]_{(0 or 2-19)}-SEQ ID NO:237;

[0045] (oo) SEQ ID NO:241-[SEQ ID NO:242]_{(0 or 2-19)}-SEQ ID NO:243;

[0046] (pp) SEQ ID NO:247-[SEQ ID NO:248]_{(0 or 2-19)}-SEQ ID NO:249;

[0047] (qq) SEQ ID NO:253-[SEQ ID NO:254]_{(0 or 2-19)}-SEQ ID NO:255;

[0048] (rr) SEQ ID NO:259-[SEQ ID NO:260]_{(0 or 2-19)}-SEQ ID NO:261;

[0049] (ss) SEQ ID NO:265-[SEQ ID NO:266]_{(0 or 2-19)}-SEQ ID NO:267;

[0050] (tt) SEQ ID NO:271-[SEQ ID NO:272]_{(0 or 2-19)}-SEQ ID NO:273;

[0051] (uu) SEQ ID NO:277-[SEQ ID NO:278]_{(0 or 2-19)}-SEQ ID NO:278;

[0052] (vv) SEQ ID NO:283-[SEQ ID NO:284]_{(0 or 2-19)}-SEQ ID NO:285;

[0053] (ww) SEQ ID NO:289-[SEQ ID NO:290]_{(0 or 2-19)}-SEQ ID NO:291;

[0054] (xx) SEQ ID NO:295-[SEQ ID NO:296]_{(0 or 2-19)}-SEQ ID NO:297;

[0055] (yy) SEQ ID NO:301-[SEQ ID NO:302]_{(0 or 2-19)}-SEQ ID NO:303;

[0056] (zz) SEQ ID NO:307-[SEQ ID NO:308]_{(0 or 2-19)}-SEQ ID NO:309;

[0057] (aaa) SEQ ID NO:313-[SEQ ID NO:314]_{(0 or 2-19)}-SEQ ID NO:315;

[0058] (bbb) SEQ ID NO:319-[SEQ ID NO:320]_{(0 or 2-19)}-SEQ ID NO:321;

[0059] (ccc) SEQ ID NO:325-[SEQ ID NO:326]_{(0 or 2-19)}-SEQ ID NO:327;

[0060] (ddd) SEQ ID NO:331-[SEQ ID NO:332]_{(0 or 2-19)}-SEQ ID NO:333;

[0061] (eee) SEQ ID NO:337-[SEQ ID NO:338]_{(0 or 2-19)}-SEQ ID NO:339;

[0062] (fff) SEQ ID NO:343-[SEQ ID NO:344]_{(0 or 2-19)}-SEQ ID NO:345;

[0063] (ggg) SEQ ID NO:349-[SEQ ID NO:350]_{(0 or 2-19)}-SEQ ID NO:351;

[0064] (hhh) SEQ ID NO:355-[SEQ ID NO:356]_{(0 or 2-19)}-SEQ ID NO:357;

[0065] (iii) SEQ ID NO:361-[SEQ ID NO:362]_{(0 or 2-19)}-SEQ ID NO:363;

[0066] (jjj) SEQ ID NO:367-[SEQ ID NO:368]_{(0 or 2-19)}-SEQ ID NO:369;

[0067] (kkk) SEQ ID NO:373-[SEQ ID NO:374]_{(0 or 2-19)}-SEQ ID NO:375;

[0068] (lll) SEQ ID NO:379-[SEQ ID NO:380]_{(0 or 2-19)}-SEQ ID NO:381;

[0069] (mmm) SEQ ID NO:385-[SEQ ID NO:386]_{(0 or 2-19)}SEQ ID NO:387;

[0070] (nnn) SEQ ID NO:391-[SEQ ID NO:392]_{(0 or 2-19)}-SEQ ID NO:393;

[0071] (ooo) SEQ ID NO:397-[SEQ ID NO:398]_{(0 or 2-19)}-SEQ ID NO:399;

[0072] (ppp) SEQ ID NO:403-[SEQ ID NO:404]_{(0 or 2-19)}-SEQ ID NO:405; and

[0073] (qqq) SEQ ID NO:409-[SEQ ID NO:410]_{(0 or 2-19)}-SEQ ID NO:411;

[0074] wherein the domain in: brackets is an optional internal domain.

[0075] In one embodiment, polypeptide comprises or consists of the amino acid sequence selected from the group consisting of:

[0076] (A) SEQ ID NO:4-[SEQ ID NO:5]_{(0 or 2-19)}-SEQ ID NO:6;

[0077] (B) SEQ ID NO:10-[SEQ ID NO:11]_{(0 or 2-19)}-SEQ ID NO:12;

[0078] (C) SEQ ID NO:16-[SEQ ID NO:1]_{(0 or 2-19)}-SEQ ID NO:18;

[0079] (D) SEQ ID NO:22-[SEQ ID NO:23]_{(0 or 2-19)}-SEQ ID NO:24;

[0080] (E) SEQ ID NO:28-[SEQ ID NO:29]_{(0 or 2-19)}-SEQ ID NO:30;

[0081] (F) SEQ ID NO:34-[SEQ ID NO:35]_{(0 or 2-19)}-SEQ ID NO:36;

[0082] (G) SEQ ID NO:40-[SEQ ID NO:41]_{(0 or 2-19)}-SEQ ID NO:42;

[0083] (H) SEQ ID NO:46-[SEQ ID NO:47]_{(0 or 2-19)}-SEQ ID NO:48;

[0084] (I) SEQ ID NO:52-[SEQ ID NO:53]_{(0 or 2-19)}-SEQ ID NO:54;

[0085] (J) SEQ ID NO:58-[SEQ ID NO:59]_{(0 or 2-19)}-SEQ ID NO:60;

[0086] (K) SEQ ID NO:64-[SEQ ID NO:65]_{(0 or 2-19)}-SEQ ID NO:66;

[0087] (L) SEQ ID NO:70-[SEQ ID NO:71]_{(0 or 2-19)}-SEQ ID NO:72;

[0088] (M) SEQ ID NO:76-[SEQ ID NO:77]_{(0 or 2-19)}-SEQ ID NO:78;

[0089] (N) SEQ ID NO:82-[SEQ ID NO:83]_{(0 or 2-19)}-SEQ ID NO:84;

[0090] (O) SEQ ID NO:88-[SEQ ID NO:89]_{(0 or 2-19)}-SEQ ID NO:90;

[0091] (P) SEQ ID NO:94-[SEQ ID NO:95]_{(0 or 2-19)}-SEQ ID NO:96;

[0092] (Q) SEQ ID NO:100-[SEQ ID NO:101]_{(0 or 2-19)}-SEQ ID NO:102;

[0093] (R) SEQ ID NO:106-[SEQ ID NO:107]_{(0 or 2-19)}-SEQ ID NO:108;

[0094] (S) SEQ ID NO:112-[SEQ ID NO:113]_{(0 or 2-19)}-SEQ ID NO:114;

[0095] (T) SEQ ID NO:118-[SEQ ID NO:119]_{(0 or 2-19)}-SEQ ID NO:120;

[0096] (U) SEQ ID NO:124-[SEQ ID NO:125]_{(0 or 2-19)}-SEQ ID NO:126;

[0097] (V) SEQ ID NO:130-[SEQ ID NO:131]_{(0 or 2-19)}-SEQ ID NO:132;

[0098] (W) SEQ ID NO:136-[SEQ ID NO:137]_{(0 or 2-19)}-SEQ ID NO:138;

[0099] (X) SEQ ID NO:142-[SEQ ID NO:143]_{(0 or 2-19)}-SEQ ID NO:144;

[0100] (Y) SEQ ID NO:148-[SEQ ID NO:149]_{(0 or 2-19)}-SEQ ID NO:150;

[0101] (Z) SEQ ID NO:154-[SEQ ID NO:155]_{(0 or 2-19)}-SEQ ID NO:156;

[0102] (AA) SEQ ID NO:160-[SEQ ID NO:161]_{(0 or 2-19)}-SEQ ID NO:162;

[0103] (BB) SEQ ID NO:166-[SEQ ID NO:167]_{(0 or 2-19)}-SEQ ID NO:168;

[0104] (CC) SEQ ID NO:172-[SEQ ID NO:173]_{(0 or 2-19)}-SEQ ID NO:174;

[0105] (DD) SEQ ID NO:178-[SEQ ID NO:179]_{(0 or 2-19)}-SEQ ID NO:180;

[0106] (EE) SEQ ID NO:184-[SEQ ID NO:185]_{(0 or 2-19)}-SEQ ID NO:186;

[0107] (FF) SEQ ID NO:190-[SEQ ID NO:191]_{(0 or 2-19)}-SEQ ID NO:192;

[0108] (GG) SEQ ID NO:196-[SEQ ID NO:197]_{(0 or 2-19)}-SEQ ID NO:198;

[0109] (HH) SEQ ID NO:202-[SEQ ID NO:203]_{(0 or 2-19)}-SEQ ID NO:204;

[0110] (II) SEQ ID NO:208-[SEQ ID NO:209]_{(0 or 2-19)}-SEQ ID NO:210;

[0111] (JJ) SEQ ID NO:214-[SEQ ID NO:215]_{(0 or 2-19)}-SEQ ID NO:216;

[0112] (KK) SEQ ID NO:220-[SEQ ID NO:221]_{(0 or 2-19)}-SEQ ID NO:222;

[0113] (LL) SEQ ID NO:226-[SEQ ID NO:227]_{(0 or 2-19)}-SEQ ID NO:228;

[0114] (MM) SEQ ID NO:232-[SEQ ID NO:233]_{(0 or 2-19)}-SEQ ID NO:234;

[0115] (NN) SEQ ID NO:238-[SEQ ID NO:239]_{(0 or 2-19)}-SEQ ID NO:240;

[0116] (OO) SEQ ID NO:244-[SEQ ID NO:245]_{(0 or 2-19)}-SEQ ID NO:246;

[0117] (PP) SEQ ID NO:250-[SEQ ID NO:251]_{(0 or 2-19)}-SEQ ID NO:252;

[0118] (QQ) SEQ ID NO:256-[SEQ ID NO:257]_{(0 or 2-19)}-SEQ ID NO:258;

[0119] (RR) SEQ ID NO:262-[SEQ ID NO:263]_{(0 or 2-19)}-SEQ ID NO:264;

[0120] (SS) SEQ ID NO:268-[SEQ ID NO:269]_{(0 or 2-19)}-SEQ ID NO:270;

[0121] (TT) SEQ ID NO:274-[SEQ ID NO:275]_{(0 or 2-19)}-SEQ ID NO:276;

[0122] (UU) SEQ ID NO:280-[SEQ ID NO:281]_{(0 or 2-19)}-SEQ ID NO:282;

[0123] (VV) SEQ ID NO:286-[SEQ ID NO:287]_{(0 or 2-19)}-SEQ ID NO:288;

[0124] (WW) SEQ ID NO:292-[SEQ ID NO:293]_{(0 or 2-19)}-SEQ ID NO:294;

[0125] (XX) SEQ ID NO:298-[SEQ ID NO:299]_{(0 or 2-19)}-SEQ ID NO:300;

[0126] (YY) SEQ ID NO:304-[SEQ ID NO:305]_{(0 or 2-19)}-SEQ ID NO:306;

[0127] (ZZ) SEQ ID NO:310-[SEQ ID NO:311]_{(0 or 2-19)}-SEQ ID NO:312;

[0128] (AAA) SEQ ID NO:316-[SEQ ID NO:317]_{(0 or 2-19)}-SEQ ID NO:318;

[0129] (BBB) SEQ ID NO:322-[SEQ ID NO:323]_{(0 or 2-19)}-SEQ ID NO:324;

[0130] (CCC) SEQ ID NO:328-[SEQ ID NO:329]_{(0 or 2-19)}-SEQ ID NO:330;

[0131] (DDD) SEQ ID NO:334-[SEQ ID NO:335]_{(0 or 2-19)}-SEQ ID NO:336;

[0132] (EEE) SEQ ID NO:340-[SEQ ID NO:341]_{(0 or 2-19)}-SEQ ID NO:342;

[0133] (FFF) SEQ ID NO:346-[SEQ ID NO:347]_{(0 or 2-19)}-SEQ ID NO:348;

[0134] (GGG) SEQ ID NO:352-[SEQ ID NO:353]_{(0 or 2-19)}-SEQ ID NO:354;

[0135] (HHH) SEQ ID NO:358-[SEQ ID NO:359]_{(0 or 2-19)}-SEQ ID NO:360;

[0136] (III) SEQ ID NO:364-[SEQ ID NO:365]_{(0 or 2-19)}-SEQ ID NO:366;

[0137] (JJJ) SEQ ID NO:370-[SEQ ID NO:371]_{(0 or 2-19)}-SEQ ID NO:372;

[0138] (KKK) SEQ ID NO:376-[SEQ ID NO:377]_{(0 or 2-19)}-SEQ ID NO:378;

[0139] (LLL) SEQ ID NO:382-[SEQ ID NO:383]_{(0 or 2-19)}-SEQ ID NO:384;

[0140] (MMM) SEQ ID NO:388-[SEQ ID NO:389]_{(0 or 2-19)}-SEQ ID NO:390;

[0141] (NNN) SEQ ID NO:394-[SEQ ID NO:395]_{(0 or 2-19)}-SEQ ID NO:396;

[0142] (OOO) SEQ ID NO:400-[SEQ ID NO:401]_{(0 or 2-19)}-SEQ ID NO:402;

[0143] (PPP) SEQ ID NO:406-[SEQ ID NO:407]_{(0 or 2-19)}-SEQ ID NO:408; and

[0144] (QQQ) SEQ ID NO:412-[SEQ ID NO:413]_{(0 or 2-19)}-SEQ ID NO:414;

[0145] wherein the domain in brackets is an optional internal domain.

[0146] In one embodiment the optional internal domain may be absent. In another embodiment, the optional internal domain is present in 2-19 copies, such as in 2-3 copies.

[0147] In another aspect, the invention provides polypeptides comprising of consisting of a polypeptide having at least 50% identity over its length with the amino acid sequence selected from the group consisting of SEQ ID NO: 415-497. In various further embodiments, the polypeptides comprise or consist of a polypeptide having at least 75% identity, 90% identity, or 100% identity over its length with the amino acid sequence selected from the group consisting of SEQ ID NO: 415-497.

[0148] In another embodiment, the invention provides a protein assembly comprising a plurality of polypeptides of the invention having the same amino acid sequence. In various further embodiments, the invention provides recombinant nucleic acids encoding a polypeptides of the invention, recombinant expression vectors comprising the nucleic acid of the invention operatively linked to a promoter, and recombinant host cells comprising the recombinant expression vectors of the invention.

[0149] In one aspect, a method is provided. A computing device determines a protein repeating unit. The protein repeating unit includes one or more protein helices and one or more protein loops. The computing devices generates a protein backbone structure that includes at least one copy of the protein repeating unit. The computing de vice determines Whether a distance between a pair of helices of the protein backbone structure is between a lower distance threshold and an upper distance threshold. After determining that the distance between, the pair of helices of the protein backbone structure is between the lower distance threshold and the upper distance threshold, the computing device is used for: generating a plurality of protein sequences based on the protein backbone structure, selecting a particular protein sequence of the plurality of protein sequences based on an energy landscape for the particular protein sequence, where the energy landscape includes information about energy and distance from a target fold of the particular protein sequence, and generating an output based on the particular protein sequence.

[0150] In another aspect, a computing device is provided. The computing device includes one or more data processors and a computer-readable medium, configured to store at least computer-readable instructions that, when executed, cause the computing device to perform functions. The functions include: determining a protein repeating unit, where the protein repeating unit includes one or more protein helices and one or more protein loops; generating a protein backbone structure that includes at least one copy of the protein repeating unit; determining whether a distance between a pair of helices of the protein backbone structure is between a lower distance threshold and an upper distance threshold; and after determining that the distance between the pair of helices of the protein backbone structure is between the lower distance threshold and the upper distance threshold, using the computing device for: generating a plurality of protein sequences based on the protein backbone structure, selecting a particular protein sequence of the plurality of protein sequences based on an energy landscape for the particular protein sequence, where the energy landscape includes information about energy and distance from a target fold of the particular protein sequence, and generating an output based on the particular protein sequence.

[0151] In another aspect, a computer-readable medium is provided. The computer-readable medium is configured to store at least computer-readable instructions that, when executed by one or more processors of a computing device, cause the computing device to perform functions. The functions include: determining a protein repeating unit, where the protein repeating unit includes one or more protein helices and one or more protein loops; generating a protein backbone structure that includes at least one copy of the protein repeating unit; determining whether a distance between a pair of helices of the protein backbone structure is between a lower distance threshold and an upper distance threshold; and after determining that the distance between the pair of helices of the protein backbone structure is between the lower distance threshold and the upper distance threshold, using the computing device for: generating a plurality of protein sequences based on the protein backbone structure, selecting a particular protein sequence of the plurality of protein sequences based on an energy landscape for the particular protein sequence, where the energy landscape includes information a bout energy and distance from a target fold of the particular protein sequence, and generating an output based on the particular protein sequence.

[0152] In another aspect, a device is provided. The device comprises: means for determining a protein repeating unit, where the protein repeating unit includes one or more protein helices and one or more protein loops; means for generating a protein backbone structure that includes at least one copy of the protein repeating unit; means for determining whether a distance between a pair of helices of the protein backbone structure is between a lower distance threshold and an upper distance threshold; and means for, after determining that the distance between the pair of helices of the protein backbone structure is between the tower distance threshold and the upper distance threshold: generating a plurality of protein sequences based on the protein backbone structures selecting a particular protein sequence of the plurality of protein sequences based on an energy landscape for the particular protein sequence, where the energy landscape includes information about energy and distance from a target fold of the particular protein sequence, and generating an output based on the particular protein sequence.

### BRIEF DESCRIPTION OF THE DRAWINGS

[0153] FIG. 1: Schematic overview of the computational design method. The lengths of each helix and loop were systematically enumerated. For each choice of (a) helix and loop lengths, individual repeat units (red boxes on right) were built up from fragments of proteins of known structure, and then propagated to generate extended (b) repeating structures (gray) with right-handed or left-handed twist.

[0154] FIG. 2: Characterization of designed repeat proteins (a), overall summary. Values for subset with disulfide bonds are in parentheses. (b), results on six representative designs. Top row (c): design models. Second row (d): computed energy landscapes. Energy is on y axis (REU, Rosetta energy unit) and RMSD from design model on x axis. All six landscapes are strongly funneled into the designed energy minimum. Third row (e): CD spectra collected at 25° C. (red), 95° C. (blue) and back to 25° C. (black). The proteins do not denature within this temperature range (MRE, mean residue elipticity; deg·cm²·dmol⁻¹·residue⁻1). Bottom row (f); SEC elution profile directly after affinity chromatography purification. The designs are mostly monodisperse. The maximum absorbance at 280 nm was normalized to 1.

[0155] FIG. 3: Crystal structures of fifteen designs are in close agreement with the design models. Crystal structures are in yellow, and the design models in grey. Insets in circles show the overall shape of the repeat protein. The RMSD values across all backbone heavy atoms are: (a) 1.50 Å (DHR4), (b) 1.73 Å (DHR5), (c) 1.30 Å (DHR7), (d) 2.28 Å (DHR8), (e) 1.79 Å (DHR10), (f) 2.38 Å (DHR14), (g) 1.21 Å (DHR18), (h) 0.87 Å (DHR49), (i) 1.33 Å (DHR53) (j) 0.93 Å (DHR54), (k) 1.54 Å (DHR64), (l) 0.67 Å (DHR71), (m) 1.73 Å (DHR76), (n) 1.04 Å (DHR79), (o) 0.65 Å (DHR81). Hydrophobic side chains in the crystal structures (in red) are largely captured by the designs (FIG. 6).

[0156] FIG. 4: Computational protocol for designing de novo repeat proteins. (a), flowchart of the design protocol. The green box indicates user-controlled inputs, the grey boxes represent steps where protein structure is created or modified, and the white boxes indicate where structures are filtered. (b), low resolution backbone build. (c), quick full-atom design (grey) improves the backbone model (red). The superposition in the middle highlights the structural changes introduced. (d), structural profile: a 9-residue fragment is matched against the PDB repository for structures within 0.5 Å RMSD. The sequences from these structures are used to generate a sequence profile that influences design. e, packing filters were used to discard designs with cavities in the cote, illustrated as grey spheres.

[0157] FIG. 5: Model validation by in silico folding. To assess folding robustness seven sequence variants were made for each design, (a-g) illustrate the energy landscape explored by Rosette ab-initio. In red are the protein models produced by ab initio search, in green by side chain repacking and minimization (relax). Models in deep global energy minimum near the relaxed structures are considered folded. The variant with highest density of ab initio models near the relax region was chosen for experimental characterization (blue box). (b), Jalview sequence alignment of the first 100 residues of the variants (from top to bottom: SEQ ID NOS: 581-588). The yellow bar height indicates sequence conservation, while the black bar how often the consensus sequence occurs.

[0158] FIG. 6: Superposition, between single internal repeats (second repeat) of designs (grey) and crystal structures (yellow). (a) 1.50 Å (DHR4), (b) 1.73 Å (DHR5), (c) 1.30 Å (DHR7), (d) 2.28 Å (DHR8), (e) 1.79 Å (DHR10), (f) 2.38 Å (DHR14), (g) 1.21 Å (DHR18), (h) 0.87 Å (DHR49), (i) 1.33 Å (DHR53), (J) 0.93 Å (DHR54), (k) 1.54 Å (DHR64), (l) 0.67 Å (DHR71), (m) 1.73 Å (DHR76), (n) 1.04 Å (DHR79), (o) 0.65 Å (DHR81). Aliphatic and aromatic side chains are in red and cysteines arc in orange, DHR7 and 18 show intra repeat disulphide bonds while DHR4 and 81 form inter-repeat cystines. DHR5 does not form the expected SS bond. Core side chains in design recapitulate the conformation observed in the crystal structures. Even when the backbone is shifted (e.g. DHR5, 8, 15), rotamers are by large correctly predicted.

[0159] FIG. 7: Designs are stable to chemical denaturation by guanidine HCl (GuHCl). Circular dichroism monitored GuHCl denaturant experiments were carried for two designs for which crystal structures were solved (DHR4 and DHR14), two with overall shapes confirmed by SAXS (DHR21 and DHR62), and two with overall shapes inconsistent with SAXS (DHR17 and DHR67). In contrast to almost all native proteins, four of the six proteins do not denature at GuHCl concentrations up to 7.5 M. Both designs not confirmed by SAXS were extremely stable 10 GuHCl denaturant and hence are very well folded proteins; the discrepancies between the computed and experimental SAXS profiles may be due to small amounts of oligomeric species or variation in overall twist.

[0160] FIG. 8 is a block diagram of an example computing network.

[0161] FIG. 9A is a block diagram of an example computing device.

[0162] FIG. 9B depicts an example cloud-based server system.

[0163] FIG. 10 is a flow chart of an example method.

### DETAILED DESCRIPTION

[0164] All references cited are herein incorporated by reference in their entirety. Within this application, unless otherwise stated, the techniques utilized may be found in any of several well-known references such as: Molecular Cloning; A Laboratory Manual (Sambrook, et al., 1989, Cold Spring Harbor Laboratory Press), Gene Expression Technology (Methods in Enzymology, Vol. 185, edited by D. Goeddel; 1991, Academic Press, San Diego, Calif.), “Guide to Protein Purification” in Methods in Enzymology (M. P. Deutscher, ed., (1990) Academic Press, Inc.); PCR Protocols: A Guide to Methods and Applications (Innis, et al. 1990. Academic Press, San Diego, Calif.), Culture of Animal Cells: A Manual of Basic Technique, 2^{nd} Ed. (R. I. Freshney; 1987, Liss, Inc. New. York, N.Y.), gene Transfer and Expression Protocols, pp. 109-128, ed. E. J. Murray, The Humana Press Inc., Clifton, N.J.), and the Ambion 1998 Catalog (Ambion, Austin, Tex).

[0165] As used herein, the singular forms “a”, “an” and “the” include plural referents unless the context clearly dictates otherwise; “And” as used herein is interchangeably used wit “or” unless expressly stated otherwise.

[0166] As used herein, the amino acid residues are abbreviated as follows: alanine (Ala; A), asparagine (Asn; N), aspartic acid (Asp; D), arginine (Arg; R), cysteine (Cys; C), glutamic acid (Glu; E), glutamine (Gln; Q), glycine (Gly; G), histidine (His; H), isoleucine (Ile; I), leucine (Leu; L), lysine (Lys; K), methionine (Met; M), phenylalanine (Phe; F), proline (Pro; P), serine (Ser; S), threonine (Thr; T), tryptophan (Trp; W), tyrosine (Tyr; Y), and valine (Val; V).

[0167] All embodiments of any aspect of the invention can be used in combination, unless the context clearly dictates otherwise.

[0168] In a first aspect, the present disclosure provides polypeptides comprising or consisting of the amino acid sequence selected from the group consisting of:
[0169] (a) SEQ ID NO:1-[SEQ ID NO:2]_{(0 or 2-19)}-SEQ ID NO:3:
[0170] (b) SEQ ID NO:7-[SEQ ID NO:8]_{(0 or 2-19)}-SEQ ID NO:9;
[0171] (c) SEQ ID NO:13-[SEQ ID NO:14]_{(0 or 2-19)}-SEQ ID NO:15;
[0172] (d) SEQ ID NO:19-[SEQ ID NO:20]_{(0 or 2-19)}-SEQ ID NO:21;
[0173] (e) SEQ ID NO:25-[SEQ ID NO:26]_{(0 or 2-19)}-SEQ ID NO:27;
[0174] (f) SEQ ID NO:31-[SEQ ID NO:32]_{(0 or 2-19)}-SEQ ID NO:33;
[0175] (g) SEQ ID NO:37-[SEQ ID NO:38]_{(0 or 2-19)}-SEQ ID NO:39;
[0176] (h) SEQ ID NO:43-[SEQ ID NO:44]_{(0 or 2-19)}-SEQ ID NO:45;
[0177] (i) SEQ ID NO:49-[SEQ ID NO:50]_{(0 or 2-19)}-SEQ ID NO:51;
[0178] (j) SEQ ID NO:55-[SEQ ID NO:56]_{(0 or 2-19)}-SEQ ID NO:57;
[0179] (k) SEQ ID NO:61-[SEQ ID NO:62]_{(0 or 2-19)}-SEQ ID NO:63;
[0180] (l) SEQ ID NO:67-[SEQ ID NO:68]_{(0 or 2-19)}-SEQ ID NO:69;
[0181] (m) SEQ ID NO:73-[SEQ ID NO:74]_{(0 or 2-19)}-SEQ ID NO:75;
[0182] (n) SEQ ID NO:79-[SEQ ID NO:80]_{(0 or 2-19)}-SEQ ID NO:81;
[0183] (o) SEQ ID NO:85-[SEQ ID NO:86]_{(0 or 2-19)}-SEQ ID NO:87;
[0184] (p) SEQ ID NO:91-[SEQ ID NO:92]_{(0 or 2-19)}-SEQ ID NO:93;
[0185] (q) SEQ ID NO:97-[SEQ ID NO:98]_{(0 or 2-19)}-SEQ ID NO:99:
[0186] (r) SEQ ID NO:103-[SEQ ID NO:104]_{(0 or 2-19)}-SEQ ID NO:105;
[0187] (s) SEQ ID NO:109-[SEQ ID NO:109]_{(0 or 2-19)}-SEQ ID NO:111;
[0188] (t) SEQ ID NO:115-[SEQ ID NO:116]_{(0 or 2-19)}-SEQ ID NO:117;
[0189] (u) SEQ ID NO:121-[SEQ ID NO:122]_{(0 or 2-19)}-SEQ ID NO:123;
[0190] (v) SEQ ID NO:127-[SEQ ID NO:128]_{(0 or 2-19)}-SEQ ID NO:129;
[0191] (w) SEQ ID NO:133-[SEQ ID NO:134]_{(0 or 2-19)}-SEQ ID NO:135;
[0192] (x) SEQ ID NO:139-[SEQ ID NO:140]_{(0 or 2-19)}-SEQ ID NO:141;
[0193] (y) SEQ ID NO:145-[SEQ ID NO:146]_{(0 or 2-19)}-SEQ ID NO:147;
[0194] (z) SEQ ID NO:151-[SEQ ID NO:152]_{(0 or 2-19)}-SEQ ID NO:153;
[0195] (aa) SEQ ID NO:157-[SEQ ID NO:158]_{(0 or 2-19)}-SEQ ID NO:159;
[0196] (bb) SEQ ID NO:163-[SEQ ID NO:164]_{(0 or 2-19)}-SEQ ID NO:165;
[0197] (cc) SEQ ID NO:169-[SEQ ID NO:170]_{(0 or 2-19)}-SEQ ID NO:171;
[0198] (dd) SEQ ID NO:175-[SEQ ID NO:176]_{(0 or 2-19)}-SEQ ID NO:177;
[0199] (ee) SEQ ID NO:181-[SEQ ID NO:182]_{(0 or 2-19)}-SEQ ID NO:183;
[0200] (ff) SEQ ID NO:187-[SEQ ID NO:188]_{(0 or 2-19)}-SEQ ID NO:189;
[0201] (gg) SEQ ID NO:193-[SEQ ID NO:194]_{(0 or 2-19)}-SEQ ID NO:195;
[0202] (hh) SEQ ID NO:199-[SEQ ID NO:200]_{(0 or 2-19)}-SEQ ID NO:201;
[0203] (ii) SEQ ID NO:205-[SEQ ID NO:206]_{(0 or 2-19)}-SEQ ID NO:207;
[0204] (jj) SEQ ID NO:211-[SEQ ID NO:212]_{(0 or 2-19)}-SEQ ID NO:213;
[0205] (kk) SEQ ID NO:217-[SEQ ID NO:218]_{(0 or 2-19)}-SEQ ID NO:219;
[0206] (ll) SEQ ID NO:223-[SEQ ID NO:224]_{(0 or 2-19)}-SEQ ID NO:225;
[0207] (mm) SEQ ID NO:229-[SEQ ID NO:230]_{(0 or 2-19)}-SEQ ID NO:231;
[0208] (nn) SEQ ID NO:235-[SEQ ID NO:236]_{(0 or 2-19)}-SEQ ID NO:237;
[0209] (oo) SEQ ID NO:241-[SEQ ID NO:242]_{(0 or 2-19)}-SEQ ID NO:243;
[0210] (pp) SEQ ID NO:247-[SEQ ID NO:248]_{(0 or 2-19)}-SEQ ID NO:249;
[0211] (qq) SEQ ID NO:253-[SEQ ID NO:254]_{(0 or 2-19)}-SEQ ID NO:255;
[0212] (rr) SEQ ID NO:259-[SEQ ID NO:260]_{(0 or 2-19)}-SEQ ID NO:261;
[0213] (ss) SEQ ID NO:265-[SEQ ID NO:266]_{(0 or 2-19)}-SEQ ID NO:267;
[0214] (tt) SEQ ID NO:271-[SEQ ID NO:272]_{(0 or 2-19)}-SEQ ID NO:273;
[0215] (uu) SEQ ID NO:277-[SEQ ID NO:278]_{(0 or 2-19)}-SEQ ID NO:278;
[0216] (vv) SEQ ID NO:283-[SEQ ID NO:284]_{(0 or 2-19)}-SEQ ID NO:285;
[0217] (ww) SEQ ID NO:289-[SEQ ID NO:290]_{(0 or 2-19)}-SEQ ID NO:291;
[0218] (xx) SEQ ID NO:295-[SEQ ID NO:296]_{(0 or 2-19)}-SEQ ID NO:297;
[0219] (yy) SEQ ID NO:301-[SEQ ID NO:302]_{(0 or 2-19)}-SEQ ID NO:303;
[0220] (zz) SEQ ID NO:307-[SEQ ID NO:308]_{(0 or 2-19)}-SEQ ID NO:309;
[0221] (aaa) SEQ ID NO:313-[SEQ ID NO:314]_{(0 or 2-19)}-SEQ ID NO:315;
[0222] (bbb) SEQ ID NO:319-[SEQ ID NO:320]_{(0 or 2-19)}-SEQ ID NO:321;
[0223] (ccc) SEQ ID NO:325-[SEQ ID NO:326]_{(0 or 2-19)}-SEQ ID NO:327;
[0224] (ddd) SEQ ID NO:331-[SEQ ID NO:332]_{(0 or 2-19)}-SEQ ID NO:333;
[0225] (eee) SEQ ID NO:337-[SEQ ID NO:338]_{(0 or 2-19)}-SEQ ID NO:339;
[0226] (fff) SEQ ID NO:343-[SEQ ID NO:344]_{(0 or 2-19)}-SEQ ID NO:345;
[0227] (ggg) SEQ ID NO:349-[SEQ ID NO:350]_{(0 or 2-19)}-SEQ ID NO:351;
[0228] (hhh) SEQ ID NO:355-[SEQ ID NO:356]_{(0 or 2-19)}-SEQ ID NO:357;
[0229] (iii) SEQ ID NO:361-[SEQ ID NO:362]_{(0 or 2-19)}-SEQ ID NO:363;
[0230] (jjj) SEQ ID NO:367-[SEQ ID NO:368]_{(0 or 2-19)}-SEQ ID NO:369;
[0231] (kkk) SEQ ID NO:373-[SEQ ID NO:374]_{(0 or 2-19)}-SEQ ID NO:375;
[0232] (lll) SEQ ID NO:379-[SEQ ID NO:380]_{(0 or 2-19)}-SEQ ID NO:381;
[0233] (mmm) SEQ ID NO:385-[SEQ ID NO:386]_{(0 or 2-19)}-SEQ ID NO:387;
[0234] (nnn) SEQ ID NO:391-[SEQ ID NO:392]_{(0 or 2-19)}-SEQ ID NO:393;
[0235] (ooo) SEQ ID NO:397-[SEQ ID NO:398]_{(0 or 2-19)}-SEQ ID NO:399;
[0236] (ppp) SEQ ID NO:403-[SEQ ID NO:404]_{(0 or 2-19)}-SEQ ID NO:405; and
[0237] (qqq) SEQ ID NO:409-[SEQ ID NO:410]_{(0 or 2-19)}-SEQ ID NO:411;
[0238] wherein the domain in brackets is an optional internal domain.

[0239] The polypeptides of the invention represent novel repeat proteins with precisely specified geometries identified using the methods of the invention, opening up a wide array of new possibilities for biomolecular engineering. The polypeptides of this aspect include 2 or 3 domains, and are represented in Table 1 below, reflected in each row showing listed as “DHRx_variants” (where x is replaced by a specific number in the table). As shown in the table, the residues in brackets are possible variant positions of the residue immediately preceding it. The domains noted as “Ncap” and “Ccap” are always present, while the domain listed as “internal” is optional. When present, the “internal” domain is present in 2-19 copies

TABLE1

| Module | Ncap | Internal | Ccap |
|---|---|---|---|
| DHR1_variants | G[SDN]C[SDT]D[E]Q[DE]V[I | C[AKN]D[QS]C[A]V[I]AK[A | R[END]D[EK]C[A]V[I]R[KED] |
| | ET]AK[RE]D[KER]AS[AYR]S | DR]AAS[ARY]S[A]II[V]R[KE | K[AN]AAS[KR]S[A]II[LE]R |
| | [KED]T[RDE]I[V]R[KE]E[NQ | A]AVI[AL]E[T]K[QE]N[LAF] | [KEN]AVQ[KER]E[DKQ]K[QE] |
| | R]V[A]I[AL]E[KQ]K[EN]N[Y | PN[G]Y[ND]S[PAE]E[DQ]V[A] | N[LAF]P[E]N[G]Y[ND]S[PE |
| | RA]PN[G]Y[ND]S[PA]E[DKT] | V[IA]AD[TEI]VAAAIV[I]K | N]E[DKN]V[A]V[KIA]E[KRN] |
| | K[TQD]V[TA]AD[KER]V[EL] | [AEL]AI[V]I[ALV]E[KD]G[SQ] | D[IKT]VK[EHR]R[KDE]AIE |
| | AAK[ER]IV[I]K[AL]K[ER]I[V] | N[AS]PN[G]G[SD] (SEQ ID | [KR]K[DEQ]AI[R]K[ERQ]E[K |
| | I[ALV]E[K]G[ERS]N[SRD]P | NO: 2) | DR]G[SAQ]N[AD]PN[G] (SEQ |
| | N[G]G[SDN] SEQ ID NO: 1) | | ID NO: 3) |
| DHR2_design | SDADEAAKEANKAENKAR | DAVEAAKEAAKALNKALN | DAVEKAKEAAKNLNKALN |
| | NRNDDEAAKAVKLIKEAIER | RNDDEAAKAVALIAEAIIRA | RNDDEQAKHVAKQAENIIR |
| | AKKRNES (SEQ ID NO: 10) | LKRNES (SEQ ID NO: 11) | ALKRNES (SEQ ID NO: 12) |
| DHR2_variants | S[DET]D[TS]A[S]D[E]E[DKR] | D[TE]AV[IL]E[KQ]AAK[AE] | D[ES]AV[IL]E[KRD]K[RN]A |
| | AA[KRE]K[RE]E[LAR]AN[D | E[LRA]AAK[ERQ]ALN[IKQ] | K[RAQ]E[KQR]AAK[ER]N[K |
| | EQ]K[ER]AE[R]N[KE]K[LE]A | K[L]ALN[KQD]R[NQ]N[HGE] | ET]LN[IKS]K[EQR]ALN[QKD] |
| | R[E]N[KRE]R[NKQ]N[G]D[N] | D[N]D[ER]E[RD]AAK[ER]AV | R[EKN]N[GH]D[SN]D[EQ]E |
| | D[ES]E[DNS]AA[QIK]K[ER]A | A[K]L[KR]IAE[KR]AIIR[EAL] | [D]Q[EKA]AK[R]H[KEN]VA |
| | VK[E]L[K]IK[QE]E[RT]AIE[K | ALK[QER]R[QK]N[G]E[SD]S | [K]K[E]Q[ETR]AE[RK]N[QK]I |
| | T]R[EQ]AK[E]K[ER]R[QK]N | [DER] (SEQ ID NO: 8) | IR[EKQ]A[D]LK[QR]R[KDE] |
| | [G]E[SD]S[DR] (SEQ ID NO: 7) | | N[G]E[DQ]S[DET] (SEQ ID |
| | | | NO: 9) |
| DHR3_design | SSEDTVRIAQKCSEAIRESN | SELAVRIIAQVCSEAIRESND | SELAKRIIKQVCSEAKRESN |
| | DCEEAARKCAKTISEAIRES | CECAARICAKIISEAIRESNS | DTECAKRICTKIKSEAKRES |
| | NS (SEQ ID NO: 16) | (SEQ ID NO: 17) | NS (SEQ ID NO: 18) |
| DHR3_variants | S[D]S[T]E[D]D[EQ]T[ADE]V | S[TE]E[D]LA[LT]V[T]R[K]II | S[DEP]E[D]L[K]A[LR]K[ERD] |
| | [T]R[KQ]E[ERD]I[AV]A[S]Q[K | [AV]A[S]Q[AE]V[A]C[AVI]S | R[KQ]II[AV]K[DEN]Q[EA]V |
| | E]K[DQR]C[AVI]S[AR]E[KD | [AR]E[A]AIR[KEQ]E[T]S[A]N | [A]C[EAK]S[REK]E[A]AK[R]R |
| | N]A[D]IR[KEQ]E[KT]S[ENQ] | D[N]C[T]E[DK]C[AS]AAR[K | [EKQ]E[TV]S[A]N[K]D[N]T |
| | N[K]D[N]C[T]E[DRT]E[KR]A | EH]IC[A]AK[ETR]II[V]S[RAE] | [DEK]E[DK]C[AS]AK[TDN]R |
| | AR[KQE]K[DER]C[A]AK[ET | E[AKQ]A[L]I[AV]R[EK]E[Q | [KE]IC[AST]T[KEQ]K[QRE]IK |
| | D]T[IEK]I[V]S[RAE]E[KDN]A | R]S[AQ]N[G]S[D] (SEQ ID | [RE]S[ERK]E[AQR]A[L]K[RE] |
| | [LT]I[AT]R[KET]E[KQ]S[AL] | NO: 14) | R[EKN]E[Q]S[NQ]N[G]S[D] |
| | N[G]S[N] (SEQ ID NO: 13) | | (SEQ ID NO: 15) |
| DHR6_design | SEEKEEALKKVREAAKKLG | AYEAAEALFKVLEAAYKLG | AYEAAERLFEFLERAYEEGS |
| | SSDEEARKCFEEAREWAER | SSAEEACECFNQAAEWAER | SAEEACEEFNKKEEEAHRK |
| | TGSS (SEQ ID NO: 22) | TGSG (SEQ ID NO: 23) | GKK (SEQ ID NO: 24) |
| DHR6_variants | S[D]E[D]E[KD]K[DER]E[KN | AY[AW]E[LQR]AAE[HK]AL | AY[AK]E[DO]AAE[HKR]R[E |
| | Q]E[TKR]AL[EKR]K[EQN]K | [A]F[A]K[EQN]VL[A]E[K]AA | K]L[A]F[A]E[QKR]E[VQ]L[A] |
| | [ELQ]VR[E]E[DRT]AAKK[EQ] | Y[HAW]K[R]L[N]GS[A]SAE | ER[EKN]AY[WAH]E[K]E[RN |
| | L[NQ]GS[A]S[N]D[ESO]E[D] | [DR]E[Q]AC[ARL]E[KQ]C[A | Q]GS[KLE]S[D]AE[RDK]E[Q |
| | E[QDH]AR[EDK]K[ERQ]C[A | W]FN[DES]Q[ER]AAE[QKR] | R]AC[ART]E[KR]E[Q]F[Y]N |
| | NW]F[TW]E[RK]E[RQ]AR[A | WAE[KQS]R[EK]T[N]GS[AV] | [DS]K[RE]K[ERD]E[AQ]E[KR] |
| | KS]E[KNQ]W[A]AE[KNS]R[E | G[NT] (SEQ ID NO: 20) | E[KR]AH[KQR]R[KE]K[END] |
| | Q]T[A]GS[AV]S[NDT] (SEQ | | GK[QT]K[NDT] (SEQ ID NO: |
| | ID NO: 19) | | 21) |
| DHR7_design | STKEDARSTCEKAARKAAE | TKEAARSFCEAAARAAAES | TKEAARSFCEAAKRAAKES |
| | SNDEEVAKQAAKDCLEVAK | NDEEVAKIAAKACLEVAKQ | NDEEVEKIAKKACKEVAKQ |
| | QAGMP (SEQ ID NO: 28) | AGMP (SEQ ID NO: 29) | AGMP (SEQ ID NO: 30) |
| DHR7_variants | ST[SD]K[QE]E[DR]D[K]AR[K | T[RAE]K[R]E[KR]AAR[KEQ] | T[RKP]K[QR]E[K]AAR[KE]S |
| | ET]S[EKR]T[EQ]CE[RKQ]K | S[EDK]FCE[KQR]AAAR[EK] | [ERA]FCE[KR]AAK[E]R[KEQ] |
| | [RQ]AAR[EQ]K[REH]AAE[KN | AAAE[R]S[QEH]N[KR]D[S]E | AAK[RDE]E[K]S[QKN]N[GK] |
| | R]S[QKD]N[KR]D[NS]E[PK]E | [PKT]E[TKD]V[A]AK[ER]I[V | D[S]E[PDS]E[KQT]V[A]E[KR] |
| | [DNK]V[EDQ]AK[ERH]Q[KR | A]AAK[RYI]ACL[AKR]E[AQ | K[ER]I[VA]AK[RED]K[ERQ] |
| | E]AAK[REQ]D[ERK]CL[AKR] | R]V[A]AK[DEQ]Q[EN]AGM | ACK[ERQ]E[QAK]V[A]A[KL |
| | E[RK]V[A]AK[DQE]Q[KRE] | [AL]P[DT] (SEQ ID NO: 26) | R]K[ERD]Q[E]AGM[AL]P[DT] |
| | AGM[AL]P[DTN] (SEQ ID | | (SEQ ID NO: 27) |
| | NO: 25) | | |
| DHR8_design | SDEMKKVMEALKAVELA | DEMAKVMLALAKAVLLAA | DEMAKKMLELAKRVLDAA |
| | KKNNDDEVAKEIERAAKEIV | KNNDDEVAREIARAAAEIVE | KNNDDETAREIARQAAEEV |
| | EALRENNS (SEQ ID NO: 34) | ALRENNS (SEQ ID NO: 35) | EADRENNS (SEQ ID NO: 36) |
| DHR8_variants | S[DT]D[STN]E[KDT]M[AIQ] | D[ESK]E[DKL]M[AV]A[WIL] | D[ER]E[DKQ]M[AV]A[WIL]K |
| | K[EQR]K[EQR]V[A]M[KLR]E | K[ER]V[A]M[AL]L[AEY]A[L] | [DER]K[TED]M[AL]L[RAE]E |
| | [K]A[L]L[W]K[ERD]K[RE]AV | L[W]AK[ELQ]AV[AI]L[AR]L | [KR]L[EKW]AK[EQ]R[KES]V |
| | [AI]E[QDK]L[QI]AK[SR]K[N | [IQE]AAK[QER]N[SD]N[G]D | [AI]L[AR]D[RKQ]A[L]AK[QR] |
| | QD]N[SD]N[G]D[N]D[EPK]E | [N]D[A]E[DK]V[AQ]AR[AIQ] | N[SDE]N[G]D[N]D[A]E[KD]T |
| | [DK]V[AQ]AR[KE]E[RKA]IE | E[RQI]IAR[KEH]AAA[EK]E | [KES]AR[AIK]E[KR]I[QRT]A |
| | [KQR]R[KEH]AAK[DEQ]E[R]I | [RQ]I[A]V[A]E[RDK]AL[A]R | R[EKD]Q[KEN]AA[EV]E[RK] |
| | [A]V[KAE]E[KDR]AL[A]R[K | [AEK]E[KQT]N[VAI]N[TQK]S | E[ADK]V[A]E[RKD]A[KNE]D |
| | EN]E[KNQ]N[VAI]N[DPT]S | [DT] (SEQ ID NO: 32) | [LAE]R[AKD]E[KRQ]N[G]N |
| | [DQT] (SEQ ID NO: 31) | | [QTE]S[DT] (SEQ ID NO: 33) |
| DHR9_design | SYEDEAEEKARRVAEKVER | YEVIAEIVARIVAEIVEALKR | YEVIKEIVQRIVEEIVEALKR |
| | LKRSGTSEDEIAEEVAREISE | SGTSEDEIAEIVARVISEVIRT | SGTSEDEINEIVRRVKSEVER |
| | VIRTLKESGSS (SEQ ID NO: | LKESGSS (SEQ ID NO: 41) | TLKESGSS (SEQ ID NO: 42) |
| | 40) | | |
| DHR9_variants | S[D]Y[STD]E[DT]D[E]E[DT] | Y[ESD]E[DKS]V[AED]IAE[K | Y[SDE]E[DR]V[EQT]IK[RDQ] |
| | AE[KR]E[RK]K[RDE]AR[EK] | HR]I[V]V[IL]AR[QEA]I[AV]V | E[KH]I[V]V[IL]Q[RET]R[EQA] |
| | R[KT]V[I]AE[NRD]K[DET]V | [I]AE[AKR]I[V]V[A]E[KQR]A | I[AV]V[IAK]E[RKN]E[AKR]I |
| | [A]E[KR]R[KE]LK[YWA]R[KE | LK[QWH]R[EDQ]S[NE]GT[V] | [V]V[EIK]E[KR]ALK[QER]R |
| | D]S[NKD]GT[V]S[D]E[PNT]D | S[D]E[PT]D[EQT]E[LQ]IAE[K | [KE]S[NET]GT[V]S[D]E[PS]D |
| | [ET]E[KQ]IAE[KDQ]E[KRT]V | RD]I[V]V[A]AR[EHI]V[I]I[VL] | [E]E[QLK]IN[KRE]E[KR]I[V]V |
| | [A]AR[EKD]E[QDN]I[VL]S[A | S[AEK]E[RV]V[I]I[L]R[EKQ] | [ESA]R[KQ]R[IHQ]V[I]K[QR |
| | RE]E[KR]V[TDK]I[AL]R[KEQ] | T[AEQ]LK[EQT]E[NKR]S[DQ | E]S[EDK]E[KRV]V[IAT]E[KR] |
| | T[EDK]LK[EQ]E[KRD]S[RD | N]GS[KQ]S(SEQ ID NO: 38) | R[KE]T[AEQ]L[QKN]K[REN] |
| | K]GS[KQ]S[D] (SEQ ID NO: | | E[KRD]S[QDN]GS[KQE]S[D |
| | 37) | | NP] (SEQ ID NO: 39) |
| DHR10_design | SSEKEELRERLVKIVVENAK | SSBVLELAIRLIKEVVENAQ | SSETLKRAIEEIRKRVEEAQR |
| | RKGDDTEEAREAAREAFEL | REGYDISEAARAAAEAFKR | EGNDISEAARQAAEEERKK |
| | VREAAERAGID (SEQ ID NO: | VAEAAKRAGIT (SEQ ID NO: | AEELKRRGD (SEQ ID NO: |
| | 46) | 47) | 48) |
| DHR10_variants | S[T]S[DE]E[DKT]K[AS]E[K]E | S[T]S[KNT]E[DTK]V[A]L[IA | S[T]S[TKW]E[DKS]T[ADR]L |
| | [KNR]L[IT]R[AKQ]E[KRN]R | V]E[KQ]L[IT]A[V]I[A]R[KE]L | [TAV]K[ER]R[EKD]A[V]I[A]E |
| | [KE]L[I]V[I]KI[KT]VV[AK]E | [I]I[V]KE[IK]VV[A]EN[AL]A | [KD]E[HKD]I[V]R[K]K[EQR]R |
| | [K]N[AL]AK[QER]R[KE]K[QN | Q[AW]RE[QKN]GY[EQ]D[N]I | [E]V[A]E[KQ]E[KRT]AQ[AL] |
| | R]GD[EQW]D[N]T[EKD]E[SD] | [V]S[AT]E[KD]AAR[QEK]A | R[KDE]E[KQ]GN[ERQ]D[NT] |
| | E[KDT]AR[AKE]E[KRD]A[D] | [D]AAE[DR]AF[VAW]K[EAQ] | I[V]S[AT]E[DQK]AAR[EKQ] |
| | AR[KE]E[K]AF[VWA]E[KR] | R[IQ]V[IA]AE[QR]AA[L]K[E | Q[ERD]AAE[KR]E[KRQ]F[V |
| | L[RI]V[IA]R[EKQ]E[RDK]AA | H]R[EHK]AGI[LD]T[VDK] | AW]R[KEA]K[RE]K[EDR]AE |
| | [L]E[KRD]R[EKD]A[S]GI[L]D | (SEQ ID NO: 44) | [QK]E[KRN]L[RA]K[HER]R[K |
| | (SEQ ID NO: 43) | | EQ]R[KE]GD[NQK] (SEQ ID |
| | | | NO: 45) |
| DHR12_design | DDEEQCREIAEKAKQTYTD | DEEICRCIAEAAKQTYTDDE | DEEIERCIEEAAKQTYTDDE |
| | DEEIARIIAEAARQTTTD | EIARIIAYAARQTTTD (SEQ | EIERIKEYARRQTTTD (SEQ |
| | (SEQ ID NO: 52) | ID NO: 53) | ID NO: 54) |
| DHR12_variants | D[N]D[ST]E[TDQ]E[D]Q[KET] | D[PK]E[TD]E[R]IC[A]R[KE]C | D[PES]E[DKN]EIE[RKD]R[K] |
| | C[A]R[KI]E[K]IAE[KR]K[QE | [LI]IAE[IR]AAK[RQ]Q[ER]T | C[LI]IE[K]E[IQ]AAK[R]Q[KE] |
| | N]AK[RQ]Q[KR]T[KDR]Y[SA | Y[ASR]T[DES]D[NTS]D[PKE] | TY[SAR]T[SD]D[TNS]D[PEQ] |
| | R]T[SD]D[TN]D[PKE]E[DKQ] | E[QDT]E[DKN]IAR[AK]I[LV] | E[DN]E[DKN]IE[KRD]R[KE |
| | E[KQA]IAR[KAE]I[ELY]IAE | IAY[AEI]AAR[KHQ]Q[KR]T | Q]I[LV]K[I]E[KD]Y[IEA]AR |
| | [KR]A[E]AR[KHQ]Q[KR]T[EQ | [Q]TTD[N] (SEQ ID NO: 50) | [EKD]R[KE]Q[EKR]T[QS]TTD |
| | R]TTD[N] (SEQ ID NO: 49) | | [N] (SEQ ID NO: 51) |
| DHR13_design | NAEDKAREVLKELKDEGSP | AEDAARAVLKALKDEGSPE | EEDASRAVLKALKDEGSPEE |
| | EEEAARQVLKDLNREGSN | EEAARAVLKALNREGSN | EARRAVEKALNREGSN |
| | (SEQ ID NO: 58) | (SEQ ID NO: 59) | (SEQ ID NO: 60) |
| DHR13_variants | N[SD]A[SDT]E[TAS]D[EK]K | A[RTE]E[TIS]D[EQK]AAR[A | E[TSK]E[DST]D[EKQ]AS[AK] |
| | [EDN]AR[ALY]E[K]V[EKQ]L | LY]A[IL]VLK[ERV]ALK[QR | R[KE]A[IK]VL[EW]K[RQE]A |
| | K[EQR]E[TKQ]LK[EQ]D[KR | N]D[QRK]E[QSR]GS[TVH]P | LK[EQR]D[QNE]E[SHQ]GS[V |
| | N]E[KQD]GS[TVL]P[SD]E[PT | [DS]E[PT]E[KST]E[Q]AAR[AL] | TK]P[SD]E[PR]E[D]E[KR]AR |
| | R]E[TRS]E[K]AAR[AEL]Q[K | A[ILQ]V[L]LK[EQR]ALN[EK] | [KN]R[EK]A[ILQ]V[A]E[KDR] |
| | EN]V[L]LK[EQR]D[EKQ]LN | R[NEQ]E[TNQ]GS[V]N[DS] | K[RED]AL[QE]N[KER]R[KN |
| | [EK]R[NKE]E[KRQ]GS[V]N[S | (SEQ ID NO: 56) | Q]E[TNH]GS[KQH]N[DR] |
| | D] (SEQ ID NO: 55) | | (SEQ ID NO: 57) |
| DHR14_design | DSEEVNERVKQLAEKAKEA | SELVNEIVKQLAEVAKEATD | SELVNEIVKQLEEEVAKEATD |
| | TDKEEVIEIVKELAELAKQS | KELVIYIVKILAELAKQSTD | KELVEHIEKILEELKKQSTD |
| | TD (SEQ ID NO: 64) | (SEQ ID NO: 65) | (SEQ ID NO: 66) |
| DHR14_variants | D[NST]S[DTN]E[D]E[D]V[IE] | S[DEN]E[DKN]L[A]V[I]N[KR | S[DEP]E[DKR]L[A]V[IQ]N[K |
| | N[RKE]E[KDN]R[KEN]V[I]K | L]E[KQ]I[A]V[I]K[REQ]Q[LA] | QE]E[RDH]I[A]V[IE]K[EQ]Q |
| | [ERD]Q[KER]L[KR]AE[K]K[E | L[V]AEVAK[R]E[Q]ATD[NS] | [LAE]L[V]E[QKR]E[KR]VA[K |
| | R]AK[Q]E[KR]ATD[NS]K[RT | K[REP]E[DRS]LV[I]I[REH]Y | QR]K[DE]E[Q]ATD[NS]K[DE |
| | P]E[DSK]E[KL]V[I]I[KRE]E | [ERK]I[L]V[AL]K[RDE]I[AL] | P]E[DKN]LV[QIR]E[KR]H[EQ |
| | [KR]I[L]V[AL]K[ER]E[KT]L[I] | L[I]A[ER]E[KQN]LAK[ER]Q | R]I[L]E[NQ]K[ER]I[AL]L[IR] |
| | A[RQ]E[KNR]L[ER]AK[QSE] | [KDE]S[A]T[QNS]D[NST] | E[KR]E[KNQ]LK[Q]K[R]Q[R |
| | Q[KR]S[A]T[SNQ]D[NST] | (SEQ ID NO: 62) | SE]S[ALR]T[NQ]D[kNS] |
| | (SEQ ID NO: 61) | (SEQ ID NO: 63) | |
| DHR15_design | NDERQKQREEVRKLAEELA | DELIKQILEVAKLAFELASK | DEEIKQILETAKEAFERASK |
| | SKATDEELIKEIKKCAQLAE | ATDEELIKEILKCCQLAFELA | ATDEEEIKILKKCQEKFEK |
| | ELASRSTN (SEQ ID NO: 70) | SRSTN (SEQ ID NO: 71) | KSRSTN (SEQ ID NO: 72) |
| DHR15_variants | N[DS]D[S]E[D]R[ETN]Q[KED] | D[P]E[TR]L[I]IK[RN]Q[LEA]I | D[P]E[DKN]E[DK]IK[RAI]Q |
| | K[RE]Q[L]R[EKQ]E[KQR]E | [A]LE[IK]V[A]AK[IL]LAF[A | [REK]I[A]LE[KQR]T[EIK]AK[I |
| | [KIR]V[A]R[E]K[DE]LA[W]E | N]E[K]LAS[QR]K[NER]A[L]T | L]E[RK]AF[AN]E[KQ]R[KDE] |
| | [KR]E[KRD]LAS[KNQ]K[NQR] | DE[P]E[NR]L[A]I[A]K[E]E[L | AS[EKQ]K[NRD]A[LI]T[DE] |
| | A[L]T[EN]D[NS]E[DSP]E[DQ] | Q]I[A]LK[ER]C[A]C[A]Q[KS] | D[ST]E[DPS]E[NKD]E[K]I[A |
| | L[A]I[RA]K[DEQ]E[QLR]I[A] | L[E]A[W]F[A]E[K]LASR[K][S | R]K[ES]E[KR]I[A]LK[ER]K[E |
| | K[Q]K[ER]C[A]AQ[KE]L[RK | A]TN[D](SEQ ID NO: 68) | R]C[A]Q[E]E[RKQ]K[REN]F |
| | E]A[W]E[KNQ]E[KDQ]LAS[K | | [A]E[KR]K[DER]K[DNS]S[N]R |
| | NE]R[KQD]S[A]TN[DS](SEQ | | [KQD]S[KN]TN[DS](SEQ ID |
| | ID NO: 67) | | NO: 69) |
| DHR16_design | NDKAKEAEELLRKALEKAE | DKAIEAVELLAKALEKALK | DKAIEEVERLAKELEKALKE |
| | KENDETAIRCVELLKEALER | ENDETAIRCVCLLAEALLRA | NDETKIREVCERAEELLRRL |
| | AKKNNN (SEQ ID NO: 76) | LKNNN (SEQ ID NO: 77) | KNNN (SEQ ID NO: 78) |
| DHR16_variants | N[D]D[T]K[T]A[S]K[DE]E[RD | D[EK]K[ET]AIEAVE[YKR]L | D[E]K[DSE]AIE[R]E[TNK]VE |
| | K]AE[KQ]E[KD]L[EKN]LR[K | [RK]LAK[ED]ALE[RLK]K[IR] | [RAL]R[KE]L[W]AK[ERD]E |
| | DE]K[EDR]AL[EK]E[RKQ]K | ALK[ERN]E[QR]NDE[KS]T[K | [KDN]LE[AKL]K[RED]ALK[E |
| | [IER]AE[QR]K[ER]E[QKR]N | D]AI[V]R[EK]C[A]VC[AL]LL | RN]E[KNQ]N[G]D[N]E[S]T[D |
| | [G]D[S]E[DKS]T[KDQ]AI[LQ] | AE[R]ALL[EK]R[EL]ALK[R] | K]K[AQS]I[V]R[EK]EVC[AL |
| | R[KE]C[A]VE[K]L[K]LK[RQE] | N[QER]N[G]N[D]10 (SEQ ID | R]E[KR]RAE[KR]E[KQR]LL |
| | E[KQ]ALE[KR]R[EIL]AK[ER] | NO: 74) | [AEK]R[ED]R[AD]LK[RE]N[K |
| | K[ER]N[QRD]N[G]N[D] | | Q]N[G]N[QK] (SEQ ID NO: |
| | (SEQ ID NO: 73) | | 75) |
| DHR17_design | SSEDAREKIEQLCREAKEIAE | SEVAREAIECLCRLAKLIAEL | SEVAREAIECLSRIAKLIEEL |
| | RAKQQNSQEEAREAIEKLLR | AKQANSQEVAREAIEALLRI | AKQANSQEVKREAQEALDR |
| | IAKRIAELAKQANQ (SEQ ID | AKLIAELAKQANQ (SEQ ID | IQKLIEELQKQANQ (SEQ ID |
| | NO: 82) | NO: 83) | NO: 84) |
| DHR17_variants | S[ND]SE[DT]D[EQ]A[N]R[KE | S[AP]E[DK]V[A]AR[ALQ]E[R | S[PAR]E[DKS]V[A]AR[KTE] |
| | L]E[KR]K[NDR]IE[KD]Q[KE] | DK]AIE[KR]C[A]LC[LAE]R[E | E[QK]AI[K]E[KR]C[A]LS[KQ |
| | LC[LRA]R[KEQ]E[KQR]AK[E | KH]I[V]AK[RE]LIAELAK[QE | N]R[EKT]I[V]A[KE]K[QRE]LI |
| | Q]E[KR]I[EV]AE[RN]R[EKT] | R]Q[EN]AN[G]S[D]Q[K]E[DK | E[KQR]E[RD]LAK[ERN]Q[E] |
| | AK[N]Q[RKE]Q[SEN]N[GK]S | T]V[A]AR[E]E[RVK]AI[V]E | AN[GK]S[D]Q[DE]E[DKT]V |
| | [N]Q[KR]E[D]E[DQS]AR[IKL] | [KDQ]ALL[AR]R[KET]I[V]AK | [A]K[RA]R[TKE]E[KIQ]AQ[K |
| | E[RK]AI[V]E[KRS]K[ERQ]L | [EQ]LIAE[RK]LAK[Q]Q[DKR] | E]E[K]AL[AKN]D[EKQ]R[KE |
| | L[AR]R[KE]I[V]AK[EQR]R[K | AN[GK]Q[TS] (SEQ ID NO: | Q]I[V]Q[DER]K[Q]LI[Q]E[KR] |
| | NO]IAE[KR]L[E]AK[QRE]Q | 80) | E[KQ]LQ[KER]K[R]Q[DEN] |
| | [KRE]AN[GK]Q[TS] (SEQ ID | | AN[GK]Q[ETS] (SEQ ID NO: |
| | NO: 79) | | 81) |
| DHR18_design | DIEKLCKKAESEAREARSKA | DIAKLCIKAASEAAEAASKA | DIAKKCIKAASEAAEEASKA |
| | EELRQRHPDSQAARDAQKL | AELAQRHPDSQAARDAIKL | AEEAQRHPDSQKARDEIKE |
| | ASQAEEAVKLACELAQEHP | ASQAAEAVLACELAQEHP | ASQAEEVKERCERAQEHP |
| | NA (SEQ ID NO: 88) | NA (SEQ ID NO: 89) | NA (SEQ ID NO: 90) |
| DHR18_variants | D[STN]I[AW]E[D]K[D]L[ER] | D[EQ]I[A]AK[LQR]L[RK]CI | D[EKQ]I[AEQ]AK[RI]K[RED] |
| | CK[EQR]K[ETH]AE[QKR]S[K | [L]K[ET]AAS[AIQ]E[LAR]AA | CI[L]K[ER]A[DKE]AS[IAE]E |
| | EN]E[LA]AR[DKQ]E[KRQ]A | E[KRI]AAS[AKI]K[LAQ]AA[I] | [KR]AAE[KR]E[ANQ]AS[AIE] |
| | R[KE]S[KED]K[LRE]AE[QDK] | E[KDS]L[A]A[L]Q[KLR]R[D | K[RE]AA[I]E[QDR]E[ILK]A[L] |
| | E[KRS]L[A]R[YKE]Q[KDN] | QE]H[RAL]PD[N]S[NT]Q[ED | Q[KRS]R[KDE]H[RY]PD[NG] |
| | R[QDE]H[RAK]PD[NG]S[NT] | K]A[V]AR[KAE]D[LEK]AI[L] | S[DT]Q[EDS]K[DER]AR[KE |
| | Q[DE]A[V]AR[KNQ]D[LET]A | K[ERQ]L[AV]A[V]S[AIR]Q[A | Q]D[KER]E[AKD]I[L]K[EDR] |
| | Q[ERI]K[E]L[AV]A[V]S[EKR] | LE]AAE[KQR]AVK[YLQ]L[E | E[KRQ]A[V]S[RAI]Q [EKR]K |
| | Q[AEL]AE[KQI]E[RKQ]AVK | KQ]ACE[KRQ]LAQ[E]E[KQR] | [DLT]AE[RDK]E[KRD]VK[LA |
| | [ER]L[EKQ]ACE[KNR]LAQ[K | H[Y]PN[G]A[S] (SEQ ID NO: | I]E[RKQ]R[KDE]CE[KR]R[K] |
| | N]E[KQR]H[Y]P[K]N[G]A[S] | 86) | AQ[ED]E[KQ]H[NY]PN[G]A |
| | (SEQ ID NO: 85) | | [SQ] (SEQ ID NO: 87) |
| DHR19_design | DEIEKVREEAEKLKKKTDDE | DEILKVIKEALKLAKKTTDK | EEILKELKEALKKAKETTDT |
| | DVLEVAREAIRAAKEATS | DVLEVAREAIRAAEEATD | EELEAREQIRKAEESTD |
| | (SEQ ID NO: 94) | (SEQ ID NO: 95) | (SEQ ID NO: 96) |
| DHR19_variants | D[TS]E[DKN]I[KQ]E[KQD]K | D[SEQ]E[DKN]ILK[ERT]V[A] | E[DSK]E[DS]ILK[EQ]E[RKL]I |
| | [EHQ]V[A]R[IK]E[KDN]E[DR] | IK[EQR]E[Q]ALK[R]L[IV]AK | K[QEN]E[RKN]ALKK[IRE]A |
| | AE[KQN]K[ER]L[IV]K[SRA] | [QSE]K[QST]TTD[T]K[TED]D | K[QS]E[TKQ]TTD[T]T[EKS]E |
| | K[RDE]K[QT]TD[NT]D[T]E[Q | [EN]V[A]LE[KR]VAR[ELQ]E | [D]E[VD]LE[KRN]K[ER]AR[E |
| | D]D[EN]V[A]L[QKR]E[RKD] | [QKL]AIR[EK]AAE[RT]E[ND | KL]E[K]Q[TED]IR[EKQ]K[D |
| | VAR[KDE]E[LAK]AI[K]R[EK] | K]ATD[S] (SEQ ID NO: 92) | QR]AE[RT]E[KNQ]S[EKQ]TD |
| | AAK[ED]E[NDK]ATS (SEQ | | [N] (SEQ ID NO: 93) |
| | ID NO: 91) | | |
| DHR20_design | SDIEEIRQLAEELRKKSDNEE | SDVLEIVKDALELAKQSTNE | EEVLEEVKEALRRAKESTDE |
| | VRKLAQEAAELAKRSTD | EVIKLALKAAVLAAKSTD | EEIKEELRKAVEEAESTD |
| | (SEQ ID NO: 100) | (SEQ ID NO: 101) | (SEQ ID NO: 102) |
| DHR20_variants | S[TDN]D[TQ]I[VAR]E[KD]E | S[KEP]D[TKQ]V[A]L[W]E[K | E[KPS]E[DKT]V[A]L[W]E[K |
| | [KR]IR[EIQ]Q[EKR]L[TEK]AE | R]IVK[EQR]D[LKR]ALE[KR] | N]E[TIR]VK[ERA]E[KR]ALR |
| | [RKQ]E[RQD]L[VI]R[ASK]K | L[VI]AK[EQ]Q[KRD]S[AT]T | [EQ]R[KDE]AK[EQR]E[KR]S |
| | [NRT]K[EDN]S[ALT]D[T]N[D] | N[D]E[DPN]E[DK]V[AI]IK[R | [AKN]TD[N]E[DNP]E[DQR]E |
| | E[DPK]E[TDQ]V[AI]R[IQ]K | A]LALK[ELR]AAVLAAK[QR] | [KDN]IK[RAE]E[RKQ]E[ADL] |
| | [RFD]LAQ[ERK]E[RTL]AAE | S[AEN]T[R]D[TS] (SEQ ID | LR[EK]K[NQR]AVE[RD]E[D |
| | [K]LAK[HQ]R[K]S[ANT]T[R] | NO: 98) | QA]AE[KQ]S[KRT]T[NR]D[T |
| | D[TS] (SEQ ID NO: 97) | | N] (SEQ ID NO: 99) |
| DHR21_design | SEKEKVEELAQRIREQLPDT | SEALKVVYLALRIVQQLPDT | QEALKSVYEALQRVQDKPN |
| | ELAREAQELADEARKSDD | ELAREALELAKEAVKSTD | TEEARESLERAKEDVKSTD |
| | (SEQ ID NO: 106) | (SEQ ID NO: 107) | (SEQ ID NO: 108) |
| DHR21_variants | S[DTN]E[KDL]K[AQS]E[K] | S[EQD]E[KNQ]AL[W]K[E]VV | Q[EDK]E[DKR]AL[W]K[ED]S |
| | [EDR]VE[R]E[KQS]LAQ[REK] | [A]Y[KAE]LALR[QAE]I[V]V | [IKD]V[A]Y[KAE]E[KQR]AL |
| | R[KDE]I[V]R[AK]E[KN]Q[NT] | [A]Q[EKL]Q[RT]LPD[N]TE[D | Q[EKR]R[TTD]V[A]Q[EKL]D |
| | LP[K]D[N]TE[DRS]L[I]AR[E | Q]L[I]AR[KE]E[KLD]ALE[KR | [KQR]K[YHR]PNTE[D]E[DK] |
| | K]E[LKQ]AQ[ENL]E[KRQ]L | D]L[V]AK[EQR]E[KDN]AV[I] | AR[KEQ]E[KQR]S[A]LE[DQR] |
| | [V]AD[EKR]E[KDQ]AR[KEQ] | K[ER]ST[Q]D[SN] (SEQ ID | R[KEQ]AK[EQR]E[K]D[EKA] |
| | K[ERT]SD[NTR]D[SN] (SEQ | NO: 104) | V[IA]K[ET]S[R]T[NQ]D[NST] |
| | ID NO: 103) | | (SEQ ID NO: 105) |
| DHR22_design | DDAEELRERARDLlRKNGS | DDAVKLAVKAAALLAENGS | EEEVKDAVREAAELAERGS |
| | SEEEIKKVDEELEKIVRKAD | SAEEIVKVLEELLKIVEKAD | SAEEIRKQLKDRLRKVEESD |
| | S (SEQ ID NO: 112) | S (SEQ ID NO: 113) | S (SEQ ID NO: 114) |
| DHR22_variants | D[S]D[TK]AE[D]E[KT]LR[A] | D[SW]D[KET]AV[A]K[ITA]L | E[SW]E[DKS]E[QT]V[A]K[IT |
| | E[OK]R[KL]AR[A]D[KOE]LL | AV[A]K[L]AAALLAE[QKR]N | A]D[REK]AV[A]R[KEL]E [TD |
| | R[KQ]K[DEQ]NGS[AQ]S[D]E | GS[AQ]SAE[DQS]E[Q]IV[RA | K]AAE[DQ]L[QER]AE[QKR] |
| | [DKP]E[DS]E[QS]LK[N]K[RQ] | Y]K[R]VLE[H]E[ALW]L[I]L | R[KDE]GS[RE]SAE[DRS]E[R] |
| | VD[LT]E[K]E[ADL]L[I]E[KQ | [A]K[R]I[A]V[I]E[QK]K[Q]AD | IR[AY]K[E]Q[TES]LK[EHR]D |
| | R]K[RQ]I[A]V[RKI]R[DEK]K | [Q]S (SEQ ID O: 110) | [EKN]R[LIQ]L[AE]R[KEQ]K |
| | [QDN]AD[QK]S (SEQ ID NO: | | [D]V[ILT]E[QKR]E[KNQ]S[A] |
| | 109) | | D[QT]S[D] (SEQ ID NO: 111) |
| DHR23_design | SDSELAKRVLKELKRRGTS | SDAMRLALRVVLELVRRGT | DDQMREALRQVLEEVRKGT |
| | DEELERMRELEKILKSATS | SSEILEKMMRMLIKIIQSATS | SSEQLERSMRKLIKEIKKRTS |
| | (SEQ ID NO: 118) | (SEQ ID NO: 119) | (SEQ ID NO: 120) |
| DHR23_variant | S[TDN]D[TR]S[AQ]E[DK]K[E | S[DE]D[TEK]AM[A]R[KEA]L | D[ES]D[ET]Q[EAL]M[A]R[K |
| | QR]LAK[QRD]R[EKT]V[AI]L | ALR[EK]V[AI]V[LI]LE[RQ]L | AE]E[RKQ]ALR[KE]Q[ETD]V |
| | [VR]K[ENR]E[QDL]L[A]K[R] | [A]V[AI]R[KE]R[KN]GT[EKQ] | [LI]LE[DRK]E[ADR]V[AI]R |
| | R[KN]R[NKS]GT[QE]S[D]D[S | SS[AIQ]E[DRT]I[EAN]L[I]E | [KEQ]K[ETD]GT[KQR]S [D]S |
| | P]E[DT]E[DAI]L[EI]E[KNR]R | [DKS]K[RT]M[ALI]M[A]R[EK] | [AIQ]E[DQR]Q[EDS]L[T]E[KD |
| | [K]M[ALI]K[ER]R[EQK]E[LA | M[LAQ]L[I]I[QR]K[ERQ]I[V | R]R[KEQ]S[TLE]M[A]R[EQ]K |
| | Q]L[I]E[KQR]K[RDE]I[VL]I[R | L]IQ[EK]S[EQA]AT[QK]S[T] | [EQ]L[I]I[KQ]K[RE]E[K]K[Q |
| | KQ]K[DER]S[EQT]AT[Q]S[T] | (SEQ ID NO: 116) | R]K[NDQ]R[S]T[Q]S[DT] |
| | (SEQ ID NO: 115) | | (SEQ ID NO: 117) |
| DHR24_design | SEAEELARRAAKEAKELCK | SEAAKLALKAALEAIELCKQ | SEEAKRALKEAKELIEQCKE |
| | RSTDEELCKELKKLAELLKE | STDEELCEELVKLAQKLIEL | STDEDECRELVKRAEELTRE |
| | LAERYPD (SEQ ID NO: 124) | AKRYPD (SEQ ID NO: 125) | AKENPD (SEQ ID NO: 126) |
| DHR24_variants | SE[DQR]AE[KQ]E[KQR]L[E] | SE[RTD]AAK[ERQ]LALK[RE | SE[D]E[ANQ]AK[ERQ]R[EK] |
| | AR[E]R[EK]AA[EK]K[E]E[RK | S]AAL[AK]E[AKR]AI[L]E[KR | ALK[ER]E[NRK]AK[AEL]E[K |
| | A]AK[REQ]E[KQS]L[AV]CK | H]L[AV]CK[REQ]Q[EKD]S[Q | RN]L[A]I[L]E[RK]Q[EKR]CK |
| | R[DKE]S[KTQ]T[NR]D[N]E[D] | T]T[N]D[N]E[DNS]E[DKN]LC | [RQE]E[KQR]S[DK]T[D]D[N]E |
| | E[DKR]L[T]CK[E]E[DKL]LK | E[RQ]E[KL]LV[A]K[ER]LAQ | [DTS]D[EKQ]E[KR]CR[EKQ] |
| | [EQ]K[ER]LAE[KQR]L[EKQ] | [KES]K[ELQ]LI[VA]E[KR]LA | E[KR]LV[A]K[ER]R[KEQ]AE |
| | LK[EN]E[KQR]LAE[KRD]R | K[EQD]R[E]Y[L]P[S]D (SEQ | [KQ]E[KR]L[EDK]I[VA]R[K E] |
| | [KEN]Y[L]PD (SEQ ID NO: | ID NO: 122) | E[KR]AK[EQR]E[KD]N[DH]P |
| | 121) | | D[K] (SEQ ID NO: 123) |
| DHR25_design | DERDKVRELIDRVEKELKRE | DEAIKVAKEIVRVILELVRE | EEAIKAKETVRRILELTREG |
| | GTSEELIEEIRKVLKKAKEA | GTSSELIEEILKVLSLAAEAA | TSEEEIREELKELRKKAQKA |
| | ADSDD (SEQ ID NO: 130) | KSTD (SEQ ID NO: 131) | KSPE (SEQ ID NO: 132) |
| DHR25_variants | D[T]E[DK]R[A]D[KE]K[E]V | D[E]E[KD]AIK[E]V[A]AK[QY | E[DR]E[DS]AIK[RE]K[IEQ]A |
| | [A]R[EKS]E[K]LID[EKQ]R[EK | E]E[L]IV[A]R[EKD]V[A]IL[A | K[RYE]E[KR]IV[A]R[EKD]R |
| | Q]V[A]E[KR]K[E]E[QL]LK[Q | KR]E[LR]LV[AT]R[EK]E[SQ | T]IL[AKR]E[R]LT[VAS]R[QK |
| | E]R[K]E[RSQ]GT[EQK]S[D]E | R]GT[EKQ]S[D]S[P]E[KRS]LI | E]E[RKD]GT[EQR]S[DNT]E[S |
| | [SPD]E[DNR]LIE[KTN]E[QA | E[QKR]E[QKD]ILK[ER]VLS | P]E[DN]E[KDQ]IR[SEK]E[K] |
| | D]IR[Q]K[ER]VLK[DRT]K[LE | [AEK]L[EK]AAE[KLR]AAK[N | E[TQR]LK[E]E[KQ]LR[AEK] |
| | N]AK[QDE]E[KQS]AAD[NKR] | RA]S[A]T[SP]D[N] (SEQ ID | K[E]K[REQ]AQ[KER]K[E]AK |
| | SD[S]D[N] (SEQ ID NO: 127) | NO: 128) | [ANR]S[K]P[S]E[D] (SEQ ID |
| | | | NO: 129) |
| DHR26_design | DECERLRQEVEKAEKELEK | DECLRLASEVVKAVQELVK | EECLREASEVVKEVQELVK |
| | LAKOSTDEEVRQIAREVAK | LAEQATDEEVIRALEVARE | EAEKSTDEEEIRELLQRAEE |
| | QLRRLAEEACRSNS (SEQ ID | LIRLAQEACRSND (SEQ ID | RIREAQERCREGD (SEQ ID |
| | NO: 136) | NO: 137) | NO: 138) |
| DHR26_variants | D[NT]E[DK]CE[D]R[KE]LR | D[KPE]E[DNK]CL[I]R[KE]LA | E[DKP]E[NSD]CL[I]R[KEN]E |
| | [NQ]Q[EKT]E[ADK]VE[KDQ] | S[EKR]E[QR]VV[A]K[EQR]A | [T]AS[EAY]E[KQ]VV[A]K[E |
| | K[RS]AE[QKI]K[EDR]E[ALK] | V[A]Q[KER]E[LKA]LV[A]K | QR]E[RKS]V[A]Q[KER]E[K]L |
| | LE[NKQ]K[ERD]L[VA]A[K]K | [EDQ]L[VA]AE[KRA]Q[KNE] | V[A]K[EQ]E[KQR]AE[KLR]K |
| | [RDQ]Q[KNE]S[A]T[N]D[N]E | A[S]TDE[P]E[KNQ]V[AIL]IR | [R]S[AD]TD[N]E[P]E[NDQ]E |
| | [P]E[NDR]V[AIL]R[I]Q[KNR] | [KE]V[LIK]AL[A]E[RDK]VAR | [KRS]IR[K]E[KR]L[AD]L[A]Q |
| | I[LEK]AR[KQ]E[KTD]VAK[E | [AEL]E[LAR]LIR[EKN]LAQ | [KER]R[EKQ]AE[ALQ]E[KRD] |
| | D]Q[EAL]LR[EKQ]R[EKQ]LA | [YAL]E[LIK]ACR[EK]S[QNE] | R[EQT]IR[KEN]E[K]AQ[EA |
| | E[RDK]E[LDH]ACR[KN]S[N | N[GR]D[N] (SEQ ID NO: 134) | Y]E[K]R[KNQ]CR[EQ]E[KN |
| | QE]N[G]S[D] (SEQ ID NO: | | R]GD[Q] (SEQ ID NO: 135) |
| | 133) | | |
| DHR27_design | TRQKEQLDEVLEEIQRLAEE | NEVIEKLLEVVKEIIRLAEEA | KERIEQLLREVKEEIRRAEEE |
| | ARKLMTDEEEAKKIQEEAE | MKKMTDEEEAAKIAKEALE | SRKETDDEEAAKRAREALR |
| | RAKEMLRRAVEKVTD (SEQ | AIKMLARAVEEVTD (SEQ | RIRERAREVEEDKS (SEQ ID |
| | ID NO: 142) | ID NO: 143) | NO: 144) |
| DHR27_variants | T[SD]R[EDK]Q[ATV]K[ED]E | N[VAD]E[DQN]V[AL]I[LV]E | K[NDE]E[DN]R[KQD]I[LV]E |
| | [KR]Q[REK]L[IA]D[KR]E[QT] | [KQR]K[ERQ]L[IA]L[AI]E[KH | [KR]Q[KRE]L[IAT]L[AI]R[ED |
| | V[A]L[IVE]E[K]E[R]IQ[KR]R | R]V[A]V[IA]K[ERQ]E[RL]IIR | K]E[KQR]V[IA]K[ELN]E[KR] |
| | [KE]L[A]AE[DK]EAR[A]K[RQ] | [E]L[A]AE[QK]E[RK]AM[A]K | E[I]IR[KE]R[EKN]AE[KQR]E |
| | L[RK]M[AE]T[SD]D[SNT][E | [ER]K[LR][A]T[ES]D[NT]E | [QRK]E[RKD]S[A]R[ED]K[R |
| | [DPS]E[NDK]E[KQR]AK[NQ] | [KDP]E[QK]E[DQR]AA[ER]I | E]E[A]T[DS]D[NST]D[KPR]E |
| | K[ER]IQ[KI]E[KDN]E[QDK]A | A[I]K[ARE]E[KQ]ALE[KQR] | [QN]E[KDR]AAK[ERN]R[IE]A |
| | E[K]R[KEQ]AK[IQ]E[KQR]M | AIK[A]M[ADL]L[IQ]AR[AE] | [T]R[KAL]E[KQR]ALR[QEK] |
| | [ADL]L[IT]R[KED]R[DQE]A | AV[A]E[IK]E[QD]V[I]T[Q]D | R[KDQ]IR[AK]E[KQN]R[ETH] |
| | V[SAH]E[KR]K[QE]V[I]T[DE] | [N] (SEQ ID NO: 140) | AR[KND]E[KRD]V[AE]E[RQ |
| | D[N] (SEQ ID NO: 139) | | K]E[KR]D[EKR]K[TDQ]S[DN |
| | | | G] (SEQ ID NO: 141) |
| DHR28_design | DEEVQRIREEVRRAIEEVRE | DLAIEAIRALWLAIEIVRLA | ELAKEAIRALRRLAEEIRRL |
| | SLERNDSEELAEELAREALER | LEQNDSELAREVAEEALRA | AEEQNDDELAREVEELARE |
| | VAEEVKESIKERPDR (SEQ | VAEVVKEAIRQRGDR (SEQ | AIEEVRKELERQRPGR (SEQ |
| | ID NO: 148) | ID NO: 149) | ID NO: 150) |
| DHR28_variants | D[TN]E[D]E[DNQ]V[IRK]Q[E | D[EQ]L[IVE]AI[EKQ]E[KQ]A | E[DS]L[IVE]AK[ED]E[KRD]A |
| | KR]R[KN]I[AL]R[KE]E[NlQ] | I[AL]R[KE]A[V]LV[A]R[EK]l | I[LEA]R[KQ]A[LV]LR[EKI]R |
| | E[TQ]V[A]R[KE]R[KQE]AI[A | [AT]AI[VAE]E[RQ]I[AL]V[IA] | [E]L[AT]AE[RK]E[RT]I[AL]R |
| | VK]E[RKQ]E[DKQ]V[IA]R[K | R[KEQ]L[E]ALE[KDQ]QN[G] | [IVA]R[KN]L[E]AE[KQ]E[KQ |
| | EQ]E[KDR]S[A]LE[DKR]R[E | D[N]S[P]E[DKQ]D[V]AR[EL | D]Q[H]N[G]D[N]D[PSQ]E[DK |
| | KN]N[G]D[N]S[PT]E[D]E[K]A | A]E[RKN]V[IA]AE[KQR]E[K | R]L[V]AR[EKQ]E[RKN]V[IA] |
| | E[ALK]E[K]L[IR]AR[EKQ]E | T]ALR[KE]AV[I]AE[QS]V[A] | E[KR]E[RK]L[EQN]AR[EDK] |
| | [KNQ]ALE[KDR]R[KTQ]V[I]A | V[A]K[Q]EA[I]IR[K]QR[A]G | E[RKQ]AI[V]E[KNR]E[R]V[A] |
| | E[RQK]E[IQA]V[A]K[R]E[RK] | [P]D[N]R[T] (SEQ ID NO: 146) | R[QED]K[ERN]E[QTV]L[RE |
| | S[ATI]IK[RQ]E[KNQ]R[HAK] | | K]E[K]R[KEN]Q[E]R[A]PG[N] |
| | PD[NG]R[TS] (SEQ ID NO: | | R[T] (SEQ ID NO: 147) |
| | 145) | | |
| DHR29_design | SEVEESAQEVEKRAQEVREE | SEVAESALQVVREALKVVL | SETARRALEKVRESLKEVLE |
| | AERRGTSQEVLDEIKRVVDE | SALERGTSEEVLKEILRVVS | QLERGTSEEELRESLREVSE |
| | ARQLAQRAKESDD (SEQ ID | EAIKLALEAIKSSD (SEQ ID | NIRKALEEIKSPD (SEQ ID |
| | NO: 154) | NO: 155) | NO: 156) |
| DHR29_variants | S[TD]E[DKR]V[ALT]E[KR]E | S[QEK]E[DKR]V[A]AE[KA]S | S[QER]E[DK]T[EDQ]AR[EKL] |
| | [KQT]S[ALQ]AQ[RED]E[KRQ] | [AEK]ALQ[EKR]V[A]V[IAL]R | R[KED]ALE[KR]K[ED]V[IA |
| | V[A]E[IKQ]K[DE]R[ELA]A | [AEK]E[ALK]A[L]L[W]K[QL | L]R[AKE]E[KR]S[AL]L[W]K |
| | [L]Q[KED]E[KRN]V[AL]R[EI | R]V[AL]V[ALI]L[IQR]S[QEA] | [ENQ]E[KDQ]V[ALI]L[IQA]E |
| | K]E[KQ]E[QRD]AE[KRQ]R[K | ALE[KQR]R[QET]GT[V]SE[D | [KQR]Q[ADR]L[Q]E[KRN]R[K |
| | DE]R[QTE]GT[V]SQ[SDP]E[D] | RW]E[DK]V[A]L[IV]K[RAD] | DQ]GT[KER]SE[DPR]E[DK]E |
| | V[AT]L[IQV]D[KRN]E[QDA] | E[LKD]IL[I]R[EKT]V[A]V[IA] | [QDK]L[IV]R[AKN]E[K]S[IQ |
| | IK[QEI]R[KEQ]V[A]V[IA]D[K | S[KQA]E[RLN]A[V]I[L]K[RE] | T]L[I]R[KE]E[KR]V[LA]S[EK |
| | ER]E[DKL]A[VL]R[KQE]Q[E | L[AV]A[ILV]L[EKQ]E[QIK]A | Q]E[KR]N[RTV]I[L]R[KEN]K |
| | R]L[AV]A[IDV]Q[KE]R[EEQ] | I[L]K[NRD]S[AL]S[T]D[NS] | [QRE]A[ILV]L[EIK]E[KR]E[D |
| | AK[RNE]E[K]S[AL]D[STQ]D | (SEQ ID NO: 152) | NK]I[L]K[RNQ]S[R]P[ST]D[S] |
| | [NS](SEQ ID NO: 151) | | (SEQ ID NO: 153) |
| DHR30_design | STVKELLDRARELMRELAE | SEVIRLIAKAIMLMAELALR | KEEIRKVAEEIMRRAKTALD |
| | RASEQGSDEEEARKLLEDLE | AAEQGSDAEEAMKLLKDLL | EARQGSDAEEAMKRLKEQL |
| | QLVQEIRRELEETGTS (SEQ | RLVLEILRELRETGTD (SEQ | RRILERLREEREKGTD (SEQ |
| | ID NO: 160) | ID NO: 161) | ID NO: 162) |
| DHR30_variants | S[NT]T[DEK]V[AIT]K[ED]E | S[NKD]E[KNR]V[A]I[KAQ]R | K[DPQ]E[DQT]E[QT]I[KAQ] |
| | [KRN]L[A]L[E]D[KNE]R[KE] | [KIE]L[A]I[V]AK[E]AIM[A]L | R[KEI]K[REN]V[TDN]AE[KR] |
| | AR[KEL]E[K]L[R]M[AL]R[E | M[AL]AE[KQR]L[A]AL[AV]R | E[KRT]IM[A]R[DE]R[ALK]A |
| | K]E[KQ]L[A]AE[KRD]R[QEL] | [EKL]AAE[KDR]Q[ED]GS[A | K[REQ]T[EQD]AL[VKN]D[E |
| | AS[AKR]E[KR]Q[ED]GS[AQ | Q]D[NT]AE[AK]E[KR]AM[A | RK]E[RQK]AR[KED]Q[KDR] |
| | N]D[TN]E[PSK]E[DKN]E[RK] | L]K[Q]LLK[RI]D[EK]L[IV]LR | GS[EQD]D[NT]AE[KAR]E[K |
| | AR[KNQ]K[EQ]LLE[KD]D[E | [E]L[A]V[I]L[A]E[RK]IL[I]R | DQ]AM[AL]K[EQ]R[EKN]LK |
| | K]L[IV]E[QKR]Q[ERK]L[A]V | [EQD]E[AL]LR[KET]E[KR]T | [TRL]E[KD]Q[EKR]LR[EK]R |
| | [IE]Q[KED]E[RDK]IR[QKN]R | [AS]GTD[ST] (SEQ ID NO: | [KN]I[QT]L[A]E[RK]R[EK]L[I] |
| | [EK]E[ALQ]LE[DK]E[DKR]T | 158) | R[EKQ]E[KNR]E[RKL]R[K]E |
| | [SA]GT[A]S[TD] (SEQ ID NO: | | [KDN]K[QEN]GTD[T] (SEQ ID |
| | 157) | | NO: 159) |
| DHR31_design | DSYTERARKAVKRYVKEEG | SYLIQAAAAVVAYVIEEGGS | RELIRRAAERVAEVIERGGS |
| | GSEEEAEREAEKVREEIRKK | PEEAVKIAEEVVRRIKEKAD | PEEAVKEAEKEVKKQKEES |
| | ASP (SEQ ID NO: 166) | D (SEQ ID NO: 167) | D (SEQ ID NO: 168) |
| DHR31_variants | DS[D]Y[A]T[E]E[KR]R[QEK] | S[DQ]Y[A]LI[L]Q[ER]AAAA | R[D]E[DS]LI[L]R[EKQ]R[KQ |
| | AR[AN]K[ERD]A[L]V[A]K[AI | V[A]V[AI]AY[W]V[A]I[L]E[K | S]AAE[KQR]R[QEK]V[AI]AE |
| | E]R[KDE]Y[W]V[AT]K[ERQ] | N]E[KQ]GG[QY]S[DT]PE[D]E | [RDK]V[AEQ]I[L]E[KR]R[KQ |
| | E[K]E[KQ]GG[QY]S[T]E[P]E | [DR]AV[A]K[RE]I[ERQ]AE[R | N]GG[KNQ]S[T]PE[D]E[QKR] |
| | [D]E[QR]AE[KR]R[KE]E[DIN] | S]E[KQR]V[L]VR[EK]R[KE]I | AV[A]K[RQ]E[N]AE[K]K[RE] |
| | AE[KN]K[ER]V[L]R[VEK]E | [AL]K[EQ]E[KNT]K[NQ]AD[N | E[LQR]VK[R]K[ER]Q[ED]K[E |
| | [KQR]E[KR]I[AL]R[EK]K[DN | R]D(SEQ ID NO: 164) | Q]E[KNQ]E[KDN]S[R]D[TN] |
| | Q]K[QE]AS[NDE]D (SEQ ID | | (SEQ ID NO: 165) |
| | NO: 163) | | |
| DHR32_design | SIQEKAKQSVIRKVKEEGGS | STLVRAAAAVVLYVLEKGG | EELIREAAKEVLKVLEEGGS |
| | EEEARERAKEVEERLKKEA | STEEAVQRAREVIERLKKEA | VEEAVERARERIEELQKRSD |
| | DD(SEQ ID NO: 172) | SD (SEQ ID NO: 173) | D (SEQ ID NO: 174) |
| DHR32_variants | S[DT]I[TAQ]Q[E]E[DKQ]K[R | S[D]T[AQ]LV[IKA]R[KL]AA | E[D]E[DSK]L[EQ]I[VKA]R[KI |
| | DQ]AK[A]Q[NRE]S[A]VI[R]R | AAVVL[YAW]Y[WA]V[A]LE | N]E[KST]AAK[NQR]E[VQR] |
| | [KE]K[WY]V[AE]K[QER]E[K | [QK]K[EQ]GG[Y]S[ND]T[V]E | VL[YAW]K[EQ]V[AT]LE[DN |
| | QN]E[QKR]GG[KY]S[ND]E[D] | [D]E[T]AV[IL]Q[KRE]R[IKQ] | Q]E[RKD]GG[Y]S[ND]V[T]E |
| | E[D]E[KQ]AR[KQ]E[KRN]R | AR[EK]E[QR]V[AT]IE[KR]R | [DQ]E[Q]AV[IL]E[KTD]R[E]A |
| | [EKL]AK[E]E[RKQ]V[AT]E[IR | [DKN]L[I]K[EQ]K[NT]E[KQD] | R[EK]E[KQR]R[QEA]IE[RK]E |
| | Q]E[RKQ]R[DEI]L[I]K[RQ]K | AS[NDK]D[S] (SEQ ID NO: | [KR]L[ERD]Q[EKS]K[TEN]R |
| | [RTD]E[KNS]AD[KNE]D[ST] | 170) | [KEN]S[AR]D[TN]D (SEQ ID |
| | (SEQ ID NO: 169) | | NO: 171) |
| DHR33_design | SETEEVKKLVEEKVKKEGG | STLLKVAALVASAVLKEGG | EELLKEAARQAEESLRQGKS |
| | SPEEAKETAKEVTEELKEES | SPEEAAETAKEVVKELRKSA | PEEAAEEAKKEVKKLKEKS |
| | QD (SEQ ID NO: 178) | SD (SEQ ID NO: 179) | QD (SEQ ID NO: 180) |
| DHR33_variants | S[DTN]E[AL]T[ELS]E[K]E[K | S[DE]T[LAE]LL[AR]K[EQR] | E[D]E[KDN]LL[AR]K[EQ]E[K |
| | D]VK[AN]K[ER]L[R]V[A]E[A | VAALV[A]AS[AK]A[WEL]V | RD]AAR[KEQ]Q[VRE]AE[A] |
| | K]E[KRQ]K[WQA]V[AT]K[Q | [A]LK[DE]E[QDK]GG[Q]S[NT | E[KRQ]S[VAT]LR[KEQ]Q[RK |
| | R]K[NDQ]E[QRD]GG[KQ]S[N | D]PE[D]E[Q]AA[V]E[KR]T[K | D]GK[GQ]S[NTD]PE[D]E[QR] |
| | D]P[D]E[D]E[RQ]AK[QE]E[K | QE]AK[ERA]E[R]V[A]VK[RD | AA[V]E[KR]E[NR]AK[AER]K |
| | QR]T[EKL]AK[DK]E[RK]V[A] | E]E[RKD]LR[TK]K[DER]S[Q | [RE]E[QHR]VK[ER]K[EQR]L |
| | T[VER]E[KD]E[RKD]LK[RT] | AT]AS[QH]D (SEQ ID NO: | [ENQ]K[TNQ]E[KNR]K[RE]S |
| | E[RKT]E[AQN]S[A]Q[DHR]D | 176)Q[T]D[K] (SEQ ID NO: 177) | |
| | [ST] (SEQ ID NO: 175) | | |
| DHR35_design | SEEDEVAKQASRYAKEQGG | SEALQVALEAARYASEEGE | EEDLKEALDRAREASERGQ |
| | DPEKKSREEAEKALEEVKKQ | DPAEALKEAARALEEVRRS | NPAESLKEAAEELKKKKEK |
| | ATS (SEQ ID NO: 184) | ATS (SEQ ID NO: 185) | SSD (SEQ ID NO: 186) |
| DHR35_variants | S[NT]E[DT]E[QKR]D[EKQ]E | S[D]E[D]A[D]L[EIK]Q[KR]V | E[D]E[D]D[A]L[EKI]K[QE]E |
| | [KQ]V[A]AK[REQ]Q[ELW]AS | [A]ALE[LW]AAR[KE]Y[W]AS | [KRQ]ALD[KER]R[E]AR[KDE] |
| | [A]R[EKD]Y[W]AK[SQR]E[K | [YHR]E[KNQ]E[Q]GE[Q]D[N] | E[RK]AS[YAQ]E[KNQ]R[ED |
| | NR]QGG[QH]D[N]PE[N]K[ED | PAE[DK]ALK[EQR]E[R]AAR | Q]GQ[E]N[D]PAE[DQ]S[A]L |
| | Q]S[A]R[LK]E[K]E[K]E[KDR]AE | [KE]ALE[K]E[QK]V[A]R[KN] | K[EHQ]E[KRQ]AAE[KR]E[K |
| | [KRN]K[ER]ALE[K]E[LQ]V[A] | R[K]S[A]AT[E]S[T] (SEQ ID | R]LK[E]K[EQR]K[ERQ]K[SN] |
| | K[REN]K[R]Q[A]AT[QS]S[T] | NO: 182) | E[KR]K[E]SS[TQ]D[RT] (SEQ |
| | (SEQ ID NO: 181) | | ID NO: 183) |
| DHR36_design | SDLEKALKRFVKEEKKKGR | SDLLTALAKFVLEEVRKGR | SEQLEKLATKVLEEVKKGR |
| | NPEEAKKEAKKLKKKLKKS | NPEEAVKEAIKLAEKLKRSA | NPKRAVEEAIKQAKEDRKR |
| | AGS (SEQ ID NO: 190) | GS (SEQ ID NO: 191) | SNS (SEQ ID NO: 192) |
| DHR36_variants | S[T]D[EN]LE[DK]KALK[NEQ] | S[D]D[AKN]LLT[KEQ]ALAK | S[D]E[DQS]Q[E]LE[RKT]K[E] |
| | R[QEN]F[Y]V[I]K[RED]E[D | [TDR]F[Y]VLE[QD]E[Q]VR[K | LAT[KRE]K[ESH]VLE[K]E[R |
| | QK]E[Q]K[ET]K[DRE]KGR[Q | EQ]KGR[KQ]N[TD]PEE[K]A | AL]VK[QE]K[R]GR[EQT]N[T |
| | K]N[DTS]P[ER]E[DKQ]E[KD | VK[R]E[S]AIK[E]LAE[Q]K[N | D]PK[E]R[EDK]AVE[RK]E[K |
| | Q]AK[R]K[RED]E[SD]AK[ER] | R]LK[RQ]R[KN]S[A]AGS | DR]AIK[ER]Q[EKN]AK[EQ]E |
| | K[E]LK[ER]K[ER]K[RD]LK | (SEQ ID NO: 188) | [KR]D[RKE]R[KN]K[REN]R |
| | [RE]K[RNT]S[A]AGS (SEQ ID | | [KTN]S[K]N[QT]S[D] (SEQ ID |
| | NO: 187) | | NO: 189) |
| DHR37_design | SSTERAAQSVKKYLQQQGK | SSVIRAAAAVVEYLLEQGY | DDVIKEAAKVVYKRLEEGQ |
| | DPDQAQKKAQEVKENIEKE | DPDQALKKAQEVARNIENE | DPDKALEEARKRAQKTEKK |
| | ANS (SEQ ID NO: 196) | ANS (SEQ ID NO: 197) | TTS (SEQ ID NO: 198) |
| DHR37_variants | S[TD]S[AQ]T[SA]E[KQD]R[K | S[DE]S[AE]V[A]IR[KES]AAA | D[E]D[ESQ]V[A]IK[RE]E[RT |
| | E]AAQ[RDK]S[AE]VK[IRY]K | A[E]VVF[EKI]YLLE[RNQ]QG | A]AAK[ERS]VVY[EIK]K[E]R |
| | [ER]YLQ[K]Q[REK]QGK[YG | Y[Q]D[S]P[A]D[E]Q[KRR]AL | [LE]LE[KQR]E[RK]GQ[YKR] |
| | R]D[SN]P[S]D[E]Q[E]AQ[ED | K[ER]K[QVE]AQ[RI]E[KR]V | D[S]P[A]D[E]K[QDE]ALE[KQ] |
| | K]K[R]K[VQ]AQ[RED]E[Q]V | AR[KNQ]N[ADQ]IEN[KDE]E | E[KQR]AR[IQ]K[ER]R[EHQ] |
| | K[AQ]E[KT]N[QAD]IE[T]K[E] | [QT]ANS[T] (SEQ ID NO: 194) | AQ[KER]K[ENR]T[EKI]EK[R |
| | E[QT]AN[T]S[T] (SEQ ID | | EN]K[ETQ]T[EKR]TS[DT] |
| | NO: 193) | | (SEQ ID NO: 195) |
| DHR39_design | SDLQEVADRIVEQLKREGRS | SELIEVAVRIVKELEEQGRSP | SDRIKKAVELVRELEERGRS |
| | PEEARKEARRLIEEIKQSAG | SEAAKEAVELIERIRRAAGG | PSEAARRAVEEEIQRSVEEDG |
| | GD (SEQ ID NO: 202) | D (SEQ ID NO: 203) | GN (SEQ ID NO: 204) |
| DHR39_variants | S[ND]D[KKN]L[TED]Q[KD]E | S[EDQ]E[DQN]LI[R]E[RDQ]V | S[DP]D[KE]R[L]IK[EQR]K[R |
| | [KNR]V[I]AD[KE]R[KEN]IV[I | [I]AV[AI]R[QEW]IV[I]K[EQ] | E]AV[AI]E[K]L[IET]V[I]R[KE |
| | R]E[KR]Q[AD]L[A]K[EQR]R | E[QAD]L[A]E[QTI]E[KNQ]Q | D]E[KQ]L[AE]E[QAN]E[KRN] |
| | [KN]E[DKN]GR[QHK]S[DN]P | [DKE]GR[QY]S[DN]P[A]S[AR] | R[KED]GR[QKN]S[DN]P[A]S |
| | [ER]E[DN]E[S]AR[EK]K[RE]E | E[R]AAK[ER]E[TK]AV[A]E[R] | [AR]E[KDN]AAR[EK]R[EKQ] |
| | [TKQ]AR[DEK]R[EK]LI[V]E | LI[V]E[KQR]R[K]IR[V]R[DE | AV[A]E[RQ]E[RDK]I[V]Q[EK |
| | [KRN]E[KRQ]IK[RQ]Q[DKE]S | Q]AAGGD[N] (SEQ ID NO: | A]R[KNE]S[DER]VE[RKD]E |
| | [A]AGGD[NT] (SEQ ID NO: | 200) | [KNR]D[NQ]GGN (SEQ ID |
| | 199) | | NO: 201) |
| DHR40_design | SESDEVAKRISKEAKKEGRS | SEAIRVAVEIADEALREGLSP | EDEIQKAVETAQEQLEEGRS |
| | EEEVKELVERFREAIEKLKE | EELVVELVERFVQAIQKLQEN | PKEVVETVEEQVKEVEEKQ |
| | QGD (SEQ ID NO: 208) | GE (SEQ ID NO: 209) | QKGE (SEQ ID NO: 210) |
| DHR40_variants | S[TD]E[DKQ]S[A]D[EK]E[K] | S[EDK]E[DKR]AI[EKV]R[EQ | E[DKS]D[E]E[SAR]I[EKV]Q |
| | V[A]AK[QE]R[KN]IS[AEK]K | K]V[A]AVE[RKQ]IAD[E]E[Q | [EK]K[RQ]AVE[RKQ]T[IED]A |
| | [ER]E[QL]AKK[R]E[DKQ]GR | L]AL[Q]R[K]E[DK]GL[KRA]S | Q[EI]E[KNQ]Q[A]L[Q]E[RDK] |
| | [KAE]S[D]E[P]E[DK]E[QR]VK | [D]P[A]E[KQ]E[QRT]VV[A]E | E[DTK]GR[KAE]S[DN]P[A]K |
| | [NQ]E[K]LV[A]E[KR]R[D]F | [R]LVE[IKQ]R[E]F[Y]V[A]Q | [ER]E[QKS]VV[A]E[RK]T[DR |
| | [Y]R[KEQ]E[KQD]AI[L]E[KQ | [KRD]AI[L]Q[ENK]K[DQ]LQ | N]VE[QI]E[RK]Q[HES]V[A]K |
| | D]K[ER]LK[QRE]E[KRD]Q[N | [RE]E[KQR]N[EQ]GE[ND] | [ET]E[KNR]V[EIN]E[DQK]E |
| | ED]GD[N] (SEQ ID NO: 205) | (SEQ ID NO: 206) | [KR]K[EL]Q[DEK]Q[KRD]K[E |
| | | | QR]GE[QKN] (SEQ ID NO: |
| | | | 207) |
| DHR41_design | SDIEKAKRIADRAIDVVRKA | SDVREAARVALEAVRVVVR | ENVRESARRALEKVLKTVQ |
| | AEKEGGSPEKIREALQQAKR | AAEEKGGSPEEVVEAVCRA | QAEEEGKSPEEVVEQVCRS |
| | CAEKLIRLVKEAQESNS | VRCAEKLIRLVKRAEESNS | VRKAEEQIRETQERERSTS |
| | (SEQ ID NO: 214) | (SEQ ID NO: 215) | (SEQ ID NO: 216) |
| DHR41_variants | S[DT]D[NLR]I[ARE]E[KDR]K | S[DEQ]D[NA]V[A]R[QK]E[K | E[DQT]N[RDE]V[A]RE[KR]S |
| | [ER]AK[ER]R[KE]I[V]AD[KE | RQ]AAR[EKQ]V[I]AL[I]E[RD | [AR]AR[KQE]R[KE]AL[I]E[K] |
| | Q]R[EK]AI[VE]D[EKR]V[AI] | Q]AVR[EK]V[AI]V[A]VR[EK] | K[HDE]VL[ER]K[ER]T[V]VQ |
| | V[A]R[QED]K[ER]AAE[KDR] | AAE[Q]E[KR]K[RET]GGS[D | [REK]Q[KEN]AE[QKS]E[KR] |
| | K[NR]E[KQR]GGS[D]P[SE]E | N]P[A]E[DKR]E[DQR]V[I]V | E[DKR]GK[G]S[D]P[A]E[DR |
| | [DNQ]K[ER]IR[KDQ]E[QKR]A | [A]E[R]AV[I]C[EAI]R[E]AV[A] | K]E[KD]V[I]V[A]E[R]Q[RND] |
| | L[EIR]Q[KDE]Q[ERD]AK[RE] | R[EK]C[AV]AE[RK]K[ERL]L | V[I]C[EKQ]R[EK]S[A]V[A]R |
| | R[EK]C[AV]AE[KR]K[RL]L | [AI]I[VL]R[EKD]L[IAV]V[A] | [EK]K[QR]AE[AKQ]E[KRQ]Q |
| | [A]I[KLR]R[KE]L[IAV]V[A]K | K[EAQ]R[EDK]AE[Q]E[RDK] | [EDR]I[VL]R[KEQ]E[KTD]T[Q |
| | [EQ]E[KRQ]AQ[EDK]E[RDK] | S[D]N[PSQ]S[N] (SEQ ID NO: | VA]Q[EAK]E[KNT]R[KE]E[Q] |
| | S[LAK]N[PS]S[N] (SEQ ID: | 212) | R[KDE]S[RK]T[NPS]S[DN] |
| | NO: 211) | | (SEQ ID NO: 213) |
| DHR42_design | SDAEEVKKQAEEIANRAYK | SDALEVARQALELARRAFET | QKALEIARKALQKAKENFE |
| | TAQKQGESDSRAKKAEKLV | AKKQGHSATEAAAFVDV | EAQKRGESATQAARFVDT |
| | RKAAEKLARLIERAQKEGD | VEAAISLAELIISAKRQGD | VEKEIKKAQEQIKRERKGD |
| | (SEQ ID NO: 220) | (SEQ ID NO: 221) | (SEQ ID NO: 222) |
| DHR42_variants | S[DT]D[TIQ]A[S]E[KQ]E[KR | S[DEQ]D[TEI]AL[AEK]E[KQ | Q[DER]K[EDT]AL[EK]E[KQR] |
| | Q]V[I]K[ERQ]K[ED]Q[EDK]A | R]V[I]AR[E]Q[EI]AL[A]E[K]I | I[V]AR[ES]K[EQ]AL[A]Q[EK |
| | E[KR]E[K]I[LT]AN[EQK]R[Q | [LT]AR[KEI]R[KDE]AFE[KR] | R]K[RD]AK[ELR]E[RK]N[AE] |
| | KE]AY[EKR]K[EDR]T[QER] | T[EQ]AK[RNT]K[R]Q[DER]G | FE[KQR]E[QKN]AQ[REN]K |
| | AQ[KRE]K[EQR]Q[DE]GE[Q | H[QLE]SAT[QR]E[QR]AAK[E] | [NR]R[DKQ]GE[KLR]S[D]AT |
| | HK]S[D]D[EPS]S[DK]R[EQ]A | AF[Y]V[AEQ]D[TAL]VVE[R | [EQR]Q[ER]AAK[QE]R[EA]F |
| | K[QDE]K[Q]AE[YFR]K[EDR] | KD]AAI[K]S[KEQ]LAE[QRT] | YIV[AEK]D[ER]T[VR]VE[KD |
| | L[TDA]VR[EKL]K[RE]AAE[R | LI[A]I[EL]S[KEQ]AK[QRE]R | R]K[E]E[A]I[REK]K[E]K[E]A |
| | KD]K[EQR]LAR[EKQ]LI[A]E | [KQ]Q[ED]GD[NS] (SEQ ID | Q[ERK]E[KR]Q[ASE]I[RLN]K |
| | [KR]R[KE]AQ[ERK]K[DER]E | NO: 218) | [ERQ]R[LE]E[QDK]R[KEQ]K |
| | [QN]GD[NS] (SEQ ID NO: | | [ER]GD[QKT] (SEQ ID NO: |
| | 217) | | 219) |
| DHR43_design | SKEEELIEKARRVAKEAIEE | SELAELISEAIQVAVEAVEE | SELAKKINDTIREAVREVQQ |
| | AKRQGKDPSEAKKAAEKLI | AVRQGKDPFKAAEAAAELI | AVEDGKDPFEAAREAAEKI |
| | KAVEEAVKEAKRLKEEGN | RAVVEAVKEAERLKREGN | RESVERVREEEEKKRRGN |
| | (SEQ ID NO: 226) | (SEQ ID NO: 227) | (SEQ ID NO: 228) |
| DHR43_variants | S[TD]K[ETD]E[L]E[KD]E[KN | S[EQT]E[DK]LAE[RKD]LIS[E | S[KET]E[DK]LAK[RDE]K[ER] |
| | Q]LIE[KR]K[ER]AR[E]R[EKQ] | KR]E[KR]AIQ[REK]V[AT]AV | IN[KRE]D[EKQ]T[AS]IR[EK |
| | V[AT]AK[ER]E[KRN]A[L]I | [I]E[RDQ]A[L]VE[DKQ]E[QT | Q]E[QK]AV[IL]R[KEQ]E[DN |
| | [V]E[KDR]E[KQT]AK[QRE]R | R]AV[QRA]R[KE]Q[DE]GK[Q | K]V[I]Q[E]Q[END]AV[QAN]E |
| | [KED]Q[DK]GK[QL]D[NS]P[E | L]D[N]P[A]F[WA]K[RED]AA | [KR]D[QKE]GK[Q]D[NT]P[A] |
| | S]S[DNT]E[KRL]AK[REQ]K | E[KR]AAAE[RK]LIR[KE]AV | F[WAT]E[DK]AAR[EKH]E[R |
| | [ER]AAE[KDR]K[ER]LIK[ENR] | V[A]E[KRD]AV[A]K[ERQ]E | KD]AAE[KQR]K[ERH]IR[EK |
| | AVE[R]E[KQR]AV[A]K[E]E | [VR]AE[RH]R[KQ]LK[ES]R[E | Q]E[KNQ]S[VET]V[A]E[KRD] |
| | [TVK]AK[ER]R[KE]LK[ER]E | K]E[NDK]GN (SEQ ID NO: | R[QED]V[A]R[QKE]E[KR]E |
| | [RKD]E[NQR]GN (SEQ ID NO: | 224) | [DKQ]E[AS]E[KR]K[RA]K[DR] |
| | 223) | | R[KEN]R[NEK]GN[KEQ] |
| | | | (SEQ ID NO: 225) |
| DHR44_design | SNEQEKKDLKKAEEAAKSP | NKAKEIILRAAEEAAKSPDP | EKAKEIIKRAAEEAQKSPDP |
| | DPELIREAIERAEESGS (SEQ | ELIRLAIEAAERSGS (SEQ ID | ELQKLAKEARERLG (SEQ ID |
| | ID NO: 232) | NO: 233) | NO: 234) |
| DHR44_variants | S[T]N[DT]E[DQ]Q[DE]E[KDN] | N[ED]K[REQ]AK[E]E[K]IILR | E[D]K[DEQ]AK[R]E[KR]IIK |
| | K[EQR]K[ER]D[RIK]LK[ER | [DEI]AAE[KR]E[V]AAK[DER] | [REL]R[ILT]AAE[DKR]E[VQ] |
| | D]K[RDE]AE[KQR]E[KQ]AA | S[A]P[ST]D[N]PE[DNQ]LI[L] | AQ[KE]K[RN]S[AE]P[SQ]D[N] |
| | K[ENR]SP[ST]D[N]PE[DNS]L | R[KDE]L[TKQ]AI[V]E[KR]A | P[E]E[DN]LQ[L]K[ER]L[KET] |
| | [KD]I[L]R[KDE]E[RKT]AI[L | [W]AE[KQR]R[E]S[Q]GS[T] | AK[EQR]E[KR]A[W]R[AEK] |
| | V]E[KDR]R[ELQ]AE[QKD]E | (SEQ ID NO: 230) | E[KRN]R[EKQ]L[QSE]G |
| | [KRQ]S[QET]GS[T] (SEQ ID | | (SEQ ID NO: 231) |
| | NO: 229) | | |
| DHR45_design | SSEEEELEKDAREASESGAD | SEVIELAKRALEAAKSGADP | EEVIELAKRALEEAKKGKDP |
| | PEWLREIVDLARESGD (SEQ | EWLLRTVRQAEESGS (SEQ | KELLEEVRKREESG (SEQ ID |
| | ID NO: 238) | ID NO: 239) | NO: 240) |
| DHR45_variants | S[DN]S[DF]E[D]E[TSD]E[KD] | S[DP]E[Q]V[A]I[K]E[K]LAK | E[PDK]E[QND]V[A]I[K]E[KR] |
| | E[KR]LE[QK]K[R]D[LKA]AR | [ES]R[LAK]AEE[QD]AAK[E]S | L[EA]AKR[EKQ]AEE[DRK]E |
| | [KD]E[S]AS[A]E[NK]S[T]GA | [T]GAD[NT]P[A]E[RKQ]W[A | [RD]AK[R]K[E]GK[QH]D[NT] |
| | D[TN]P[S]E[NT]W[ALY]LR[K | LY]LL[W]R[KQ]IVR[QDE]Q | P[A]K[REH]E[QDR]LL[W]E |
| | E]E[KR]IVD[REN]L[QTD]AR | [TE]AE[RST]E[KDN]S[E]GS[D | [KR]E[K]VR[QKA]K[ET]R[KN |
| | [KTS]E[KNR]S[Q]GD[NT] | N] (SEQ ID NO: 236) | S]E[T]E[KDR]S[RKE]G (SEQ |
| | (SEQ ID NO: 235) | | ID NO: 237) |
| DHR46_design | STKEEERIERIEKEVRSPDP | TEAEELLRRAIEAAVRAPDP | EEAELLRRAIESAKKAPDP |
| | ENIREAVRKAEELLRENPS | EAIREAYRAAEELLRENPS | EAQREAKRAEEELRKEDP |
| | (SEQ ID NO: 244) | (SEQ ID NO: 245) | (SEQ ID NO: 246) |
| DHR46_variants | S[D]T[D]K[DEQ]E[DKT]E[KL | T[DE]E[D]AE[KQR]E[KR]L[A | E[DQ]E[DK]AK[QER]E[KR]L |
| | Q]K[RED]E[KDR]R[TDK]I[E | I]LR[EAS]R[KE]AIE[RKQ]A | [AI]LR[EK]R[ETK]AIE[RKQ] |
| | AK]E[KR]R[EKD]IE[RDK]K | [RQ]AV[A]R[EKD]APD[N]P[A | S[AER]AK[QE]K[ERN]APD[N] |
| | [R]E[A]V[A]R[EKD]S[A]P[S]D | D]E[SDK]AIR[KE]E[ALR]AV | P[SEK]E[DKN]AQ[R][KDE] |
| | [N]P[ADS]E[DKN]N[EAD]IR | R[ED]AAE[RS]E[QH]LL[Y]R | E[AKL]AK[E]R[EQK]AE[QK |
| | [EK]E[KQR]AVR[EK]K[EAD] | [EK]E[NRD]N[D]P[D]S (SEQ | R]E[KR]E[QDR]LR[DKE]K[E |
| | AE[ARK]E[KR]LL[YA]R[KE | ID NO: 242) | R]E[NQD]D[N]P[D] (SEQ ID |
| | Q]E[KRN]N[D]P[D]S (SEQ ID | | NO: 243) |
| | NO: 241) | | |
| DHR48_design | NSREEEEAKRIVKEAKKSGI | SEALKEALKTVEEAAKSGYD | PEELKEALKRVLEAAKRGE |
| | DPEEVEKALREVIRVAEETG | PAEVAKALAEVIRVAEETG | DPAQVAKELAEEIRRNQEEG |
| | N (SEQ ID NO: 250) | N (SEQ ID NO: 251) | (SEQ ID NO: 252) |
| DHR48_variants | N[D]S[D]R[EDH]E[AS]E[KR] | S[PR]E[D]AL[A]K[ER]E[DKQ] | P[RQ]E[D]E[SAD]L[A]K[ENR] |
| | E[K]E[KDL]AK[ER]R[EK]I[V] | ALK[RED]I[V]V[A]E[KR]E | E[KR]ALK[ER]R[E]V[A]L[E |
| | V[A]K[E]E[QRK]AK[Q]K[E]S | [Q]AAK[ER]SGYD[N]P[A]AE | RS]E[KR]AAK[ER]R[KEQ]GE |
| | GF[Y]D[N]P[S]E[NTK]E[KQT] | [QD]VAK[RD]ALAE[KR]V[L]I | [KRT]D[N]P[A]AQ[DKE]VAK |
| | VE[KQ]K[RE]ALR[DEK]E[R | R[KE]VAE[Q]E[DR]T[HKS]G | [ED]E[K]LAE[KR]E[Q]IR[EK |
| | KQ]V[L]I[QR]R[EK]VAE[QR] | N[D] (SEQ ID NO: 248) | Q]R[EDK]N[ARD]Q[ET]E[RD |
| | E[RQ]T[KH]GN[D] (SEQ ID | | K]E[KR]G (SEQ ID NO: 249) |
| | NO: 247) | | |
| DHR49_design | DSEEEQERIRRILKEARKSGT | SEVLEEAIRVILRIAKESGSE | PRVLEEAIRVIRQIAEESGSE |
| | EESLRQAIEDVAQLAKKSQD | EALRQAIRAVAEIAKEAQD | EARRQAERAEEEIRRRAQ |
| | (SEQ ID NO: 256) | (SEQ ID NO: 257) | (SEQ ID NO: 258) |
| DHR49_variants | D[TS]S[T]E[D]E[DQ]E[WS]Q | S[P]E[DS]VL[W]E[KAR]E[RH | PR[NED]VL[W]E[KR]E[TAH] |
| | [KAE]E[KNR]R[KDN]I[A]R[K | L]AI[A]R[EDK]V[ERL]IL[AE | AI[KAQ]R[KE]V[ERQ]IR[QE |
| | EQ]R[KEN]I[T]L[AVW]K[EN | V]R[EK]I[AL]AK[DEQ]E[QD | K]Q[ERK]I[AL]AE[KDR]E[Q |
| | R]E[KND]AR[QTD]K[NR]S[D | R]S[A]GS[DN]E[DNP]E[DR]A | ND]S[A]GS[DN]E[DPS]E[DK] |
| | Q]GT[SDN]E[DKN]E[DS]S[A | [V]L[I]R[KAI]Q[ERK]AIR[ED | A[V]R[KEI]R[KE]Q[KEL]AE |
| | DQ]L[I]R[KIQ]Q[KER]AIE[K | Q]AV[I]AE[RDK]IAK[ERS]E | [KQR]R[EK]AE[IKQ]E[RDK]E |
| | DN]D[KRE]V[I]AQ[RKE]L[IE | [QDK]AQ[TND]D[NST] (SEQ | [RQT]IR[KDE]R[KD]R[QDK] |
| | V]AK[ERS]K[EDQ]S[A]Q[TN | ID NO: 254) | AQ[TND] (SEQ ID NO: 255) |
| | R]D[TS] (SEQ ID NO: 253) | | |
| DHR50_design | DPEEVRREVERATEEYRKNP | PEAVQVAVEAATQIYENTP | PEAVRVAEEAADQIRKNTP |
| | GSDEAREQLKEAVERAEEA | GSEEAKKALEIAVRAAENA | GSELAKRADEIKKRARELLE |
| | ARSPD(SEQ ID NO: 262) | ARLPD (SEQ ID NO: 263) | RLP (SEQ ID NO: 264) |
| DHR50_variants | D[SNT]P[ST]E[DS]E[DR]V[A | P[WAE]E[KD]AV[AL]Q[EDK] | P[ST]E[KDQ]AV[AL]R[KED] |
| | EL]R[KEL]R[KDE]E[TKI]V[A] | V[AT]AV[A]E[RKN]A[I]AT[K | V[TAK]AE[QKR]E[RKT]A[I] |
| | E[RKD]R[KED]AT[EKQ]E[K | QE]Q[IKR]I[V]Y[W]E[QDK]N | AD[KE]Q[IRT]I[V]R[WYI]K |
| | R]E[IRT]Y[W]R[KQD]K[E]N | [DT]T[E]PGSE[DQ]E[LAN]A | [QE]N[T]T[E]PGSE[D]L[AEN] |
| | [HRD]PGSD[ER]E[DK]AR[KE | K[ER]K[ERT]ALE[KR]I[LA]A | AK[E]R[EKT]AD[QKR]E[KN |
| | H]E[KR]Q[AS]LK[RE]E[KRQ] | VR[DE]AAE[R]N[AER]A[L]A | R]I[LA]K[A]K[E]R[EKQ]AR |
| | AVE[K]R[AD]AE[KQR]E[K]A | R[EN]L[SN]P[S]D[SNT] (SEQ | [EQK]E[KQR]L[NVA]L[KAR] |
| | [L]AR[KDE]S[LKN]P[S]D[SN | ID NO: 260) | E[KDN]R[KE]L[SAN]P[S] |
| | T] (SEQ ID NO: 259) | | (SEQ ID NO: 261) |
| DHR51_design | QSEDRKEKIRELERKARENT | ADTAKEAIQRLEDLARDYS | KETAEEAIKRLRELAEDYKG |
| | GSDEARQAVKEIARIAKEAL | GSDVASLAVKAIAKIAETAL | SEVAKLAEEAIERIEKVSRER |
| | EEGN (SEQ ID NO: 268) | RNGY (SEQ ID NO: 269) | G (SEQ ID NO: 270) |
| DHR51_variants | Q[HNK]S[DNT]E[D]D[EQT]R | A[SRK]D[E]T[V]AK[EIQ]E[H | K[RST]E[D]T[V]AE[KQ]E[HT |
| | [QAD]K[IQ]E[KR]K[DR]IR[K | T]AIQ[EKR]R[E]LE[AQK]D | Q]AI[K]K[RD]R[EQS]LR[QK |
| | QE]E[R]LE[AQK]R[KE]K[TI] | [K]L[IV]AR[EDS]D[KTE]Y[F] | E]E[KDS]L[IV]A[R]E[DKR]D |
| | AR[EKQ]E[KRT]N[YEH]T[S] | S[T]GS[T]D[ES]V[A]AS[RK]L | [KQE]Y[F]K[TED]GS[T]E[DQ] |
| | GS[T]D[E]E[DKR]AR[K]Q[KE | [E]AV[AI]K[ERQ]A[L]IAK[E | V[A]AK[E]L[EDQ]AE[KR]E |
| | N]AV[AT]K[QER]E[DKR]IAR | HR]IAE[KQ]T[VER]AL[A]R | [KQ]A[L]IE[KQR]R[EHK]IE[K |
| | [KED]IAK[ER]E[KQ]AL[A]E | [KEQ]N[Q]GY[ND] (SEQ ID | N]K[EDT]V[EIQ]S[A]R[K]E[K |
| | [KRQ]E[RK]GN[S] (SEQ ID | NO: 266) | R]R[QEN]G (SEQ ID NO: 267) |
| | NO: 265) | | |
| DHR53_design | SNDEKEKLKELLKRAEELA | NLAKKALEIILRAAEELAKL | ELAKKALEIIERAAEELKKSP |
| | KSPDREDLKEAVRLAEEVV | PDPEALKEAVKAAEKWRE | DPEAQKEAKKAEQKVREER |
| | RERPGS (SEQ ID NO: 274) | QPGS (SEQ ID NO: 275) | PG (SEQ ID NO: 276) |
| DHR53_variants | SN[DST]D[E]E[DTR]K[ED]E | N[EDS]L[NAK]AK[E]K[ERT] | E[SR]L[ANQ]AK[E]K[ER]AL |
| | [K]K[E]LK[ER]E[K]L[IRK]LK | ALE[KR]IILR[TKD]AAE[KR] | E[KDR]IIE[QK]R[ELT]AAE[K |
| | [DRE]R[K]AE[R]E[KQ]LAK[R | E[AN]LAK[EQR]LPD[NS]P[E] | RT]E[NA]LK[QER]K[R]S[L]P |
| | EN]S[L]PD[N]P[E]E[NDK]D | E[NRT]ALK[EQN]E[KRA]AV | D[NS]P[DE]E[QKN]AQ[KR]K |
| | [A]LK[ERQ]E[KR]AVR[DEK] | K[ER]AAE[K]K[DEQ]VV[I]R | [E]E[KRD]AK[E]K[RE]AE[K |
| | L[TAE]AE[KQ]E[KR]VV[I]R | [NDK]E[TQ]Q[RT]PGS (SEQ | NQ]Q[EKN]K[ERD]VR[K]E[D |
| | [EQK]E[Q]R[Q]P[S]GS (SEQ | ID NO: 272) | RK]E[TQ]R[QN]PG (SEQ ID |
| | ID NO: 271) | | NO: 273) |
| DHR54_design | TTEDERRELEKVARKAIEAA | TEAVKLALEVVARVAIEAA | EEAVRLALEVVKRVSDEAK |
| | REGNTDEVREQLQRALEIAR | RRGNTDAVREALEVALEIA | KQGNEDAVKEAEEVRKKIE |
| | ESGT (SEQ ID NO: 280) | RESGT (SEQ ID NO: 281) | EESG (SEQ ID NO: 282) |
| DHR54_variants | T[S]T[DNS]E[DQ]DE[WAD]R | T[DEK]E[KD]AV[WF]K[EDR] | E[DKP]E[RDK]AV[WF]R[KD |
| | [KEN]R[EK]E[KQN]L[I]E[KR | L[RK]AL[I]E[RD]V[A]V[AI]A | E]L[WER]AL[EIQ]E[KR]V[A] |
| | Q]K[E]V[AI]A[K]R[EKQ]K[R | [K]R[EKQ]V[A]AI[KAQ]E[A | V[AI]K[DEH]R[EKN]V[A]S[A] |
| | E]AI[KA]E[KQR]AAR[QEK]E | QR]AAR[Q]R[QK]GNT[ANR] | D[EKR]E[AKQ]AK[QED]K[E |
| | [KRD]GN[D]T[ANR]D[EK]E | D[E]AVR[EK]E[AIK]ALE[RK] | NR]Q[RK]GNE[SRD]D[ES]A |
| | [RQ]VR[EKQ]E[RK]Q[A]LQ[E | V[A]A[I]L[AIQ]E[QRK]I[A]A | V[AES]K[EDQ]E[LRA]AE[QR |
| | RD]R[KEN]A[I]L[ARI]E[KQR] | R[KND]E[DNK]S[A]GT[S] | K]E[KQ]V[AT]R[AEK]K[ER] |
| | I[AET]AR[NKE]E[KDQ]S[A | (SEQ ID NO: 278) | K[REH]I[A]E[KQR]E[KRN]E |
| | QT]GT[S] (SEQ ID NO: 277) | | [NDK]S[AK]G (SEQ ID NO: |
| | | | 279) |
| DHR55_design | SSVAEEIEKRAKKISKELKK | SDALEIAKRAVKIAEELAKQ | PKALKQAKEAVKEAEELAK |
| | EGKNPEWIEELQRAADKLV | GSNPKWIAELLKAAAKLVE | KGRNPKEIAEELKKRAKEVE |
| | EVARRATS (SEQ ID NO: 286) | VAARATS (SEQ ID NO: 287) | KLARST (SEQ ID NO: 288) |
| DHR55_variants | S[DN]S[NT]V[K]AE[DK]E[KT] | S[PE]D[VK]AL[R]E[K]IAK[E | P[SE]K[ED]AL[RW]K[RE]Q[I |
| | IE[RKA]K[E]R[TIK]AK[E]K | QL]R[KLT]AV[A]K[EQR]IAE | TE]AK[EQ]E[KRD]AV[A]K[E |
| | [E]IS[A]K[ER]E[H]LKK[R]E[Q] | [KLR]E[RDK]LAK[ERQ]Q[ER] | R]E[KQS]AE[K]E[KR]L[RKD] |
| | GK[AS]K[D]PE[TN]W[AK]IE | GS[A]N[D]PK[ES]W[AKQ[IA | AK[DRE]K[RE]GR[QDK]N[D] |
| | [QNK]E[KNR]LQ[L]R[DEK]A | E[K]LLK[EQ]AAAK[EDQ]LV | PK[ES]E[K]IAE[K]E[RHK]LK |
| | AD[ENK]K[ER]LV[A]E[RK]V | [A]E[RQ]V[A]AA[D]R[EK]AT | [ER]K[E]R[A]AK[ER]E[KTR] |
| | [A]AR[QK]R[KEN]AT[Q]S[N | [N]S[N] (SEQ ID NO: 284) | V[A]E[RKL]K[EN]L[QA]A[D] |
| | T] (SEQ ID NO: 283) | | R]KES[EQR]T[Q] (SEQ ID |
| | | | NO: 285) |
| DHR57_design | STEELKKVLERVRELSERAK | TDALRAVLEAVRLASEVAK | EEAKRAVEEAKRLAEEVSK |
| | ESTDPEEALKIAKEVIELALK | RVTDPDKALKIAKLVIELAL | RVTDPELSEKIRQLVKELEE |
| | AVKEDPS (SEQ ID NO: 292) | EAVKEDPS (SEQ ID NO: 293) | EAQKEDP (SEQ ID NO: 294) |
| DHR57_variants | S[D]T[DN]E[D]E[DK]LK[ER] | T[DE]D[LNT]ALR[EKQ]AVL | E[DKQ]E[LDT]AK[LA]R[EK] |
| | K[Q]VL[KIY]E[RK]R[DTK]V | [YAE]E[RKL]AVE[EKQ]LAS | AVE[K]E[LRK]AK[IEA]R[ED |
| | R[EKQ]E[HR]L[AD]S[A]E[KR | [A]E[R]V[A]AK[QER]R[K]V[I | K]LAE[KQR]E[RKQ]V[A]S[A] |
| | D]R[EQ]AK[REN]E[K]S[VIE] | L]T[N]D[N]PD[E]K[AL]AL[A | K[QER]R[NQK]V[IL]T[D]DP |
| | T[DS]D[N]P[T]E[DTN]E[KDN] | KR]K[E]I[LV]AK[ER]L[KW]V | [DS]E[NDK]L[KNS]S[AR]E[K |
| | AL[KAR]K[E]I[LV]AK[E]E | [A]I[V]E[KR]LAL[EAK]E[KD | RN]K[ER]I[LV]R[KE]Q[ERK] |
| | [KR]V[A]I[V]E[KR]L[E]AL[AE | L]AV[A]K[ENR]E[QNR]D[N] | L[EKW]V[AK]K[ER]E[KRD]L |
| | K]K[EQ]AV[A]K[RDE]E[K]D | PS (SEQ ID NO: 290) | E[RKQ]E[KR]E[LRD]AQ[KE |
| | [NK]PS (SEQ ID NO: 289) | | N]K[ER]E[QRH]D[NY]P (SEQ |
| | | | ID NO: 291) |
| DHR59_design | KTEVEKKAKEVIKEAKELA | TEVAKLALKVLEEAIELAKE | SDEARDALRRLEEAIEEAKE |
| | KELDSEEAKKVVERIKEAAE | NRSEEALVVLEIARAALAA | NRSKESLEKVREEAKEAEQ |
| | AAKRAAEQGK (SEQ ID NO: | AQAAEEGK (SEQ ID NO: | QAEDAREG (SEQ ID NO: |
| | 298) | 299) | 300) |
| DHR59_variants | K[N]T[S]E[KT]VE[KDR]K[ED] | T[S]E[R]VAK[E]L[RK]ALK[E] | S[T]D[ER]E[V]AR[KE]D[KER] |
| | K[QET]AK[ER]E[KR]V[A]I | V[A]LE[KT]E[RQ]AIE[RK]L | ALR[EKD]R[KE]LE[KQT[E] |
| | [KR]K[E]E[KRN]AK[ED]E[KR | [V]AK[EQR]E[KN]N[LAI]R[D | KQR]AIE[RK]E[HTD]AK[EQ |
| | N]L[V]A[REV]K[RE]E[DKN] | KP]SE[KD]E[TKQ]ALK[E]VV | R]E[KQR]N[DHR]R[DKP]SK |
| | L[IA]D[KPR]SE[DKQ]E[TVL] | [A]L[A]E[AQ]I[V]AR[KE]AA | [DE]E[D]S[A]LE[KNQ]K[E]V |
| | AK[E]K[DQR]VV[A]E[K]R[E | L[KAE]A[E]AAQ[ER]AAE[K | [A]R[LKY]E[DK]E[RIW]AK[R |
| | AQ]I[V]K[R]E[KR]AAE[K]A | RQ]E[QSD]GK[N] (SEQ ID | E]E[KQN]AE[KRA]Q[EK]Q[E |
| | [E]AK[RIE]R[EKQ]AAE[KDR] | NO: 296) | KD]AE[RD]D[RKN]AR[KQS] |
| | Q[SN]GK[N] (SEQ ID NO: | | E[NR]G (SEQ ID NO: 297) |
| | 295) | | |
| DHR60_design | TDIKKKAEEIIKEAKKQGSE | DILVRAAEIVVRAQEQGSED | PTLVKAAEKVVRAQQKGSQ |
| | DATRLAQEAKKQGT (SEQ ID | AIRLAKEASREGT (SEQ ID | DTIEKAKEESREG (SEQ ID |
| | NO: 304) | NO: 305) | NO: 306) |
| DHR60_variants | T[ND]D[TS]I[T]K[SQR]K[DE] | D[EKP]I[T]L[A]V[A]R[KDE]A | P[EQR]T[RIK]L[A]V[A]K[ER] |
| | K[ED]AE[KDN]E[RK]I[VA]I | AE[RKQ]I[VA]V[I]V[AI]R[E] | AAE[QRK]K[RE]V[I]V[AI]R |
| | [K]KE[RD]AK[QE]KQ[TEN]G | AQE[QKR]Q[EST]GSE[DRS] | [EDK]AQ[ET]Q[KRE]K[E]GSQ |
| | SE[DRS]D[TEK]AI[K]R[EK]L | D[TA]AIR[EK]L[AT]AK[REA] | [DER]D[E]T[SK]I[K]E[KR]K |
| | [AT]AQ[ERK]E[RK]AK[A]K | E[KQR]AS[A]R[E]E[QRK]GT | [RQ]AK[REN]E[KR]E[ADK]S |
| | [ERN]Q[KRE]GT[ND] (SEQ ID | [ND] (SEQ ID NO: 302) | [A]R[KE]E[KRQ]G (SEQ ID |
| | NO: 301) | | NO: 303) |
| DHR62_design | DNDEKRKRAEKALQRAQEA | NDVLRKVAEQALRIAKEAE | QDVLRKVSEQAERISKEAK |
| | EKKGDVEEAVRAAQEAVR | KQGNVEVAVKAARVAVEA | KQGNSEVSEEARKVADEAK |
| | AAKESGD (SEQ ID NO: 310) | AKQAGD (SEQ ID NO: 311) | KQTG (SEQ ID NO: 312) |
| DHR62_variants | D[SN]N[T]D[ER]E[D]K[L]R[K | N[QKT]D[E]V[LA]LR[KE]K[E | Q[KT]D[ES]V[LAS]ER[EHK] |
| | E]K[EQ]R[EK]AE[KRQ]K[ER | QR]V[A]AE[R]Q[VEA]AL[E] | K[ER]V[A]S[A]E[RQ]Q[VAE] |
| | D]AL[I]Q[KER]R[EKN]AQ[K | R[KQ]I[AV]AK[EQD]E[QL]A | AE[KQR]R[KEQ]I[AV]S[A]K |
| | ED]E[KQ]AE[RQI]K[R]K[ED | E[RQ]K[RE]Q[ED]GN[D]V[A] | [E]E[QDL]AK[ER]K[R]Q[ED] |
| | R]GD[N]V[A]E[KDR]E[RSK] | E[KRQ]V[AL]AV[A]K[EDR]A | GN[D]S[EKD]E[DQ]V[AL]S |
| | AV[A]R[KE]AA[L]Q[EK]E[R] | A[L]R[KE]V[I]AV[A]E[RD]A | [A]E[KRD]E[KQ]AR[KQE]K[E |
| | AV[A]R[EKQ]AAK[TR]E[KR] | AK[SRE]Q[EN]AGD[S] (SEQ | Q]V[I]AD[KNR]E[KRH]AK[A |
| | S[A]GD[SN] (SEQ ID NO: | ID NO: 308) | L]K[RT]Q[NE]T[A]G (SEQ ID |
| | 307) | | NO: 309) |
| DHR63_design | DPDEDRERLKEELKKIREAL | PDLAREALKEINKVIREALEI | PDLAREALEEIDKVIDEAQEI |
| | REAKEKPDPEEIKRALREVL | AKRVPDPEVIKEALRVVLEA | SERVPDEEVQREAQEVIKEA |
| | EAIRRILKLAERAGD (SEQ | IRAILKLAEQAGD (SEQ ID | DRARKKLSEQSG (SEQ ID |
| | ID NO: 316) | NO: 317) | NO: 318) |
| DHR63_variants | D[N]P[SNT]D[E]E[DK]D[A]R | PD[NEK]LAR[KEA]E[KHR]A | PD[ENK]LAR[KE]E[KR]A[VI] |
| | [EAK]E[KR]R[DEK]L[A][ER | [VI]L[A]K[ERD]E[AK]I[AV]N | L[AR]E[KR]E[AQK]I[AV]D[K |
| | Q]E[KRQ]E[AV]L[AIV]K[ER] | [ALE]K[RE]V[AL]I[A]R[KEQ] | E]K[ER]V[AL]I[AR]D[KER]E |
| | K[DIL]I[A]R[EK]E[KQR]AL[I | E[DIN]AL[AIQ]E[KR]I[A]AK | [IVN]AQ[EKS]E[RKN]I[A]S[A |
| | AS]R[KE]E[KDI]AK[REN]E[K | [ETQ]R[KTE]VPD[N]P[T]E[NT | KE]E[KNR]R[EKT]VPD[N]E |
| | T]K[IVT]PD[N]P[ST]E[NDQ]E | K]VIK[AER]E[AKT]ALR[EK | [PS]E[NKT]VQR[KEQ]E[QA]A |
| | [QTD]IK[ALR]R[EK]ALR[EK | N]VV[IA]L[AKQ]E[TAQ]AI[L | Q[KRE]E[KR]VI[AV]K[EDR] |
| | Q]E[IK]V[IA]L[KAQ]E[KR]AI | V]R[QEK]AI[A]L[AR]K[EQD] | E[QIK]AD[KQE]R[KEQ]AR[A |
| | [LV]R[EKD]R[KD]I[A]L[RA] | LAE[K]Q[H]AGD[N] (SEQ ID | KI]K[ET]K[ER]LS[AEK]E[KQ] |
| | K[EQ]LAE[KQR]R[KDQ]AGD | NO: 314) | Q[H]S[A]G (SEQ ID NO: 315) |
| | [N] (SEQ ID NO: 313) | | |
| DHR64_design | DREDELKRVEKLVKEAEELL | PEVALRAVELVVRVAELLL | PEVARRAVELVKRVAELLE |
| | RQAKEKGSEEDLEALRTA | RIAKESGSEEALERALRVAE | RIARESGSEEAKERAERVRE |
| | EEAAREAKKVLEQAEKEGD | EAARLAKRVLELAEKQGD | EARELQERVKELREREG |
| | (SEQ ID NO: 322) | (SEQ ID NO: 323) | (SEQ ID NO: 324) |
| DHR64_variants | D[S]P[S]E[DK]DE[KT]L[V]K | P[A]E[Q]V[A]AL[V]R[KE]AV | P[A]E[KRD]V[A]AR[KEH]R |
| | [ER]R[K]V[A]E[KR]K[E]L[TTE] | [A]E[R]LVVR[E]V[A]AE[KR] | [EKT]AV[A]E[KR]LVK[QR]R |
| | VK[RED]E[KQT]AE[DKQ]E | L[I]LLR[EK]I[A]AK[QEN]E[Q | [EK]V[A]AE[KDR]L[T]LE[KR] |
| | [KQ]L[KAD]L[R]R[KQE]Q[EK | DS]S[KRE]GSE[DR]E[D]ALE | R[KEQ]I[A]AR[KEN]E[QDS]S |
| | D]AK[QN]E[KR]K[E]GSE[DK] | [KQT]R[EK]AL[AE]R[EKQ]V | [EKQ]GSEE[DK]AKE[K]R[K] |
| | E[D]D[AE]LE[KDR]K[RE]AL | AE[S]E[K]AAR[K]L[Q]AK[E | AE[Kb]R[KQ]VR[EKQ]E[KD |
| | [AER]R[EKQ]T[RV]AE[AHN] | Q]R[DE]V[A]L[IA]E[DK]LAE | R]E[KQR]AR[KE]E[KR]L[E]Q |
| | E[QRK]AAR[KEN]E[R]AK[E | [QKR]K[RQ]Q[R]GD (SEQ ID | [EKR]E[KN]R[EQ]V[A]K[ED] |
| | R]K[E]V[A]L[IA]E[KDH]Q[E | NO: 320) | E[KR]LR[A]E[KR]R[K]E[Q]G |
| | KS]AE[KQ]K[ER]E[QND]GD | | (SEQ ID NO: 321) |
| | [S] (SEQ ID NO: 319) | | |
| DHR66_design | TSDDDKVREAEERVREAIER | SDAIKVAEAAARVAEAIARI | TEALKVAEKAARVAEKIARI |
| | IQRALKKRDTPDARKALEA | LEALNERDTPDARKALRAAI | LEKLNERDTPEARKKLRQAI |
| | AKKLLKVVEKAKKRGT | KLAEVVYKAAESGT (SEQ | KEAEKVYKESEQG (SEQ ID |
| | (SEQ ID NO: 328) | ID NO: 329) | NO: 330) |
| DHR66_variants | TS[DNT]D[NER]D[EQ]D[KE] | S[DTE]D[NRE]AI[AL]K[R]V | T[DER]E[DRS]AL[IA]K[EQR] |
| | K[RI]V[L]R[KED]EAE[KR]E | [L]AEAAARV[A]AE[Q]AI[A]A | V[LS]AE[K]K[EQ]AAR[KD]V |
| | [KDQ]RV[A]R[ED]E[KQR]AI | R[EK]I[A]LEAL[I]N[EKD]E[N | [A]AEK[EST]I[A]AR[DE]I[A] |
| | [EQ]E[K]R[EK]I[A]Q[KR]R[E | KS]R[NK]DT[DN]P[D]D[ES] | LE[DK]K[ER]L[I]N[KER]E[K |
| | KQ]AL[I]KK[EDN]R[NKS]D | A[L]RK[EDR]AL[V]R[K]AA[T] | DR]R[NDH]D[N]T[S]P[DE]E |
| | [P]T[SD]P[DES]D[ES]A[L]R[Q | I[V]K[EL]LAE[DK]VV[I]Y[A] | [D]A[EL]R[L]K[Q]K[EN]L[V]R |
| | K]K[REN]ALE[K]AA[I]K[QE | K[EQR]AAE[QRD]S[RQD]G | [EKQ]Q[DER]A[I]I[V]K[R]E |
| | R]K[RL]LL[AKR]K[ER]VV[I] | T (SEQ ID NO: 326) | [RDK]AE[R]K[EQ]V[I]Y[V]K |
| | E[KD]K[ERD]AK[ESQ]K[RE] | | [QER]E[KSL]S[AE]E[KQR]Q |
| | R[EQK]GT (SEQ ID NO: 325) | | [KER]G (SEQ ID NO: 327) |
| DHR67_design | TSEIDKLIKKLRQTAKEVKR | SEVAKLVWKLARTAIEVIRE | EEVAKKVWKEAYRAIEEIR |
| | EAEERKRRSTDPTVREVIER | AIERAERSTDPEVIRVILELA | KAIEKAERSTDPNEIKKILEE |
| | LAQLALDVAEEAARLIKKA | RLAAEVAKEAARLIVKATT | ARKKAEEAIERAKEIVKST |
| | TT (SEQ ID NO: 334) | (SEQ ID NO: 335) | (SEQ ID NO: 336) |
| DHR67_variants | T[ND]S[TD]E[DRT]I[LK]D[K | S[KET]E[DTK]V[LI]AK[ER]L | E[KRT]E[DN]V[LI]AK[REQ] |
| | E]K[E]LI[VK]K[ER]K[RDE]L | V[I]W[A]K[REQ]L[V]AR[AK | K[R]V[I]W[A]K[ERQ]E[LKT] |
| | V]R[QEK]Q[KNR]T[EKQ]AK | N]T[EKR]AI[L]E[KRD]V[A]I | AY[KAQ]R[EKD]AI[L]E[KD] |
| | [D]E[KQR]V[A]K[IAE]R[KEN] | [V]R[AEK]E[DR]AI[A[E]RKQ] | E[RKN]I[V]R[AEL]K[EQR]A |
| | E[RDQ]AE[K]E[KR]R[AL]K[I | R[AL]A[VI]E[LQA]R[EKN]S | [A]E[KD]K[DEQ]A[VI]E[RAK] |
| | QR]R[K]R[KEN]S[A]TD[NS]P | [A]TD[NS]P[DSE]E[TDN]V[L]I | R[KE]S[AET]T[NQ]D[NS]P[T |
| | [SD]T[RDN]V[L]R[A]E[KNT | [A]R[KE]V[IL]IL[W]E[KR]L | EQ]N[ETD]E[KDN]I[A]K[ETR] |
| | V[IL]IE[KHQ]R[E]L[AI]AQ | [AI]AR[KE]LAAE[KRS]V[I]A | K[E]I[E]L[W]E[KR]E[KNR]A |
| | [EKR]L[I]AL[KRE]D[KER]V[I] | K[IQE]E[RHK]AAR[EK]LIV | R[KE]K[E]K[IEA]AE[KR]E[K |
| | AE[KDR]E[RN]AAR[KEQ]LI | [A]KAT[KP]T[DN] (SEQ ID | R]AI[KE]E[KR]R[KET]AK[ER] |
| | K[QRE]KAT[EPQ]T[ND] | NO: 332) | E[KRQ]I[QT]V[A]K[N]S[DK] |
| | (SEQ ID NO: 331) | | T[P] (SEQ ID NO: 333) |
| DHR68_design | TPRERLEEAKERVEEIRELID | PELALRAAELLVRLIKLLIEI | PELAKRAAELLKRLIELLKEI |
| | KARKLQEQGNKEEAEKVLR | AKLLQEQGKEEAEKVLRE | AKLLEEEGNEDEAEKVKEE |
| | EAREQIREVTRELEEIAKNS | ATELIKRVTELLEKIAKNSD | AKELEERVRELEERIRKNSD |
| | DT (SEQ ID NO: 340) | T (SEQ ID NO: 31) | (SEQ ID NO: 342) |
| DHR68_variants | TP[STN]R[EK]E[D]R[KDQ]L | P[AVN]EL[I]AL[V]RAAE[K]L | P[ATV]EL[I]AK[QE]RAAE[D |
| | [V]E[RK]E[KR]AK[ER]E[KQR] | L[I]VR[KDE]LI[V]K[ER]LLI | KR]LL[I]K[EQR]R[EK]LI[V]E |
| | R[K]VE[KDQ]E[K]I[V]R[EK] | [V]E[R]IAK[E]LLQ[AL]E[RKN] | [KR]LLK[EQR]E[RKT]IAK[E] |
| | E[KR]L[DKT]I[V]D[RKE]KA | Q[S]GNK[ST]E[D]E[D]AE[K | LLE[K]E[RQ]E[SQN]GNE[SK |
| | R[E]KLQ[AEL]E[KR]Q[SKN] | RD]K[RDS]V[A]LR[EDK]E[K | P]D[E]E[D]AE[KNQ]K[RDE] |
| | GNK[WPS]E[DKT]E[K]AE[R | RT]AT[ER]E[K]L[QAE]IK[ER] | V[A]K[EQ]E[KRD]E[KRD]AK |
| | K]K[E]V[AEQ]LR[ED]E[KQR] | R[EKN]V[A]T[AER]E[KRQ]L | [END]E[KQ]L[ADQ]E[K]E[K] |
| | AR[E]E[K]Q[DKL]IR[EKD]E | [T]LE[KNR]K[EQR]I[L]AK[R | R[KED]V[A]R[KQE]E[KQ]L[I |
| | KR]V[A]T[AEQ]R[EKD]E[I]L | Q]NS[A]D[E]T (SEQ ID NO: | QK]E[K]E[KDQ]R[KDE]I[L]R |
| | E[KNS]E[KR]I[L]AK[E]NS[A] | 338) | [K]K[D]N[H]SD[EK] (SEQ ID |
| | D[KE]T (SEQ ID NO: 337) | | NO: 339) |
| DHR69_design | NPQEDLERAEKVVRSVEEV | PEVLLRVAELIVRLVEVVLE | PESLKRVAELIKRLVKVVDE |
| | LQRAKEAQREGDKEVERL | LAKLAEKNGDKEQVERLIQ | LSKLAERNGDRDQVERLRQ |
| | IKEAENQIRKARELLERVVR | TAEELIREARELLERVSREIP | LAEELRREAEELEERVRRER |
| | QPDD (SEQ ID NO: 346) | DN (SEQ ID NO: 347) | PD (SEQ ID NO: 348) |
| DHR69_variants | N[D]P[S]Q[EDK]E[DK]D[ELK] | P[WA]E[KDQ]V[AL]LL[A]R | P[WA]E[DKH]S[AL]LK[QR]R |
| | L[A]E[KR]R[KE]AE[KR]K[E | [EKQ]V[I]AE[KRQ]LI[L]V[A] | [KE]V[I]AE[DKQ]LI[L]K[ED |
| | Q]V[L]V[A]R[KE]S[KE]V[AI] | R[EDK]LV[AI]E[RKN]V[AIN] | R]R[EK]LV[ARI]K[E]V[AIN] |
| | E[KHQ]E[KR]V[ADI]L[AIV]Q | V[AI]L[AIV]E[RK]LAK[E]L[E] | V[AI]D[EK]E[KR]L[Q]S[A]K |
| | [ERK]R[KDE]AK[ER]E[KQR] | AE[QA]K[NEQ]N[EDT]GD[N] | [E]L[S]AE[KQ]R[K]N[EST]GD |
| | AQ[TS]R[KE]E[KD]GD[N]K | K[E]E[DK]Q[KET]V[A]E[RH | [N]R[EST]D[E]Q[KTD]V[A]E |
| | [E]E[DT]K[ETR]V[A]E[RKQ]R | Q]R[EKQ]LI[D]Q[EKR]T[EQ | KRN]R[KET]LR[KEN]Q[KE]L |
| | [KE]L[R]I[T]K[E]E[KR]AE[D | D]AE[KQS]E[RK]L[DAI]I[V] | [EQT]AE[KR]E[KRQ]L[DAI]R |
| | RS]N[EKQ]Q[LKA]I[V]R[KE | R[KEQ]E[KD]AR[EKT]E[KR] | [EK]R[KE]E[KDQ]AE[KR]E |
| | [Q]K[RE]AR[KTE]E[KT]L[AE | L[A]LE[DRK]R[KQE]V[A]S[A | [KQ]L[A]E[KQ]E[KR]R[ILD]V |
| | K]LE[RDQ]R[KE]V[A]V[AKR] | KR]R[KND]E[NDQ]I[RAD]PD | [A]R[KE]R[KND]E[NQT[R[A |
| | R[KN]Q[EDN]N[RAD]PD[T] | [T]N[D] (SEQ ID NO: 344) | DQ]PD[T] (SEQ ID NO: 345) |
| | D[N] (SEQ ID NO: 343) | | |
| DHR70_design | STEEKIEEARQSIKEAERSLR | TEVLIEAARLAIEVARVALK | DEVLKRAAELAKEVARVAK |
| | EGNPEKAREDVRRALELVR | VGSPETAREAVRTALELVQE | EVGSPETARQARETAERLRE |
| | ELEKLARKTGS (SEQ ID NO: | LERQARKTGS (SEQ ID NO: | ELRRNREKKG (SEQ ID NO: |
| | 352) | 353) | 354) |
| DHR70_variants | S[DN]T[SDN]E[DK]E[DQ]K[L | T[IDV]E[RDK]V[A]LI[ALV]E | D[TTR]E[DKQ]V[AT]LK[EQR] |
| | RT]I[ALW]E[KQ]E[DKS]AR | [KAD]AAR[EK]L[I]AI[V]E[R | R[EKT]AAE[RKD]L[I]AK[ER] |
| | [EKQ]Q[KRD]S[A]I[V]K[ER]E | KQ]V[A]AR[EKD]V[A]AL[A | E[KQR]V[A]AR[EK]V[A]AK |
| | [KQR]AE[QK]R[KE]S[ADN]L | Q]K[ERN]V[T]GS[D]P[ST]E | [QER]E[KQR]V[T]GS[D]P[SD] |
| | [AHR]R[KED]E[KQR]GN[SD] | [DQ]T[LV]AR[E]E[K]AV[ALI] | E[D]T[LSV]AR[KEQ]Q[KED] |
| | P[DKS]E[DKQ]K[STE]AR[EK] | R[EKQ]T[QLE]ALE[KNQ]L[A | AR[EKQ]E[KQR]T[LQA]AE |
| | E[KRQ]D[A]V[ALI]R[KEQ]R | I]V[A]Q[RKE]E[RD]L[IA]E[A | [KRQ]R[KDN]L[AI]R[EKD]E |
| | [KE]AL[EQ]E[KDN]L[AI]V[A] | KR]R[KE]Q[EAR]AR[EK]K[R | [KQ]E[RQA]L[IAK]R[KE]R[K |
| | R[KEQ]E[KR]L[IA]E[SAI]K[E | E]T[SEH]GS[DN] (SEQ ID | ED]N[EQA]R[ADN]E[KR]K[R] |
| | ERQ]L[ERD]AR[KEQ][ERT] | NO: 350) | K[QRN]G (SEQ ID NO: 351) |
| | T[QRK]G[D]S[D] (SEQ ID | | |
| | NO: 349) | | |
| DHR71_design | DPEEILERAKESLERAREASE | PELVLEAAKVALRVAELAA | PELVEEAAKVAEEVRKLAK |
| | RGDEEEFRAAEKALELAK | KNGDKEVEKKAAESALEVA | KQGDEEVYEKARETAREVK |
| | RLVEQAKKEGD (SEQ ID | KRLVEVASKEGD (SEQ ID | EELKRVREEKG (SEQ ID NO: |
| | NO: 358) | NO: 359) | 360) |
| DHR71_variants | D[N]P[SD]E[D]E[DR]I[TVD]L | P[A]E[KQ]L[A]V[I]L[A]E[DK] | P[ALT]E[DN]L[A]V[I]E[RKQ] |
| | [AET]E[K]R[KN]AK[REQ]E | AAK[REQ]V[I]ALR[EK]V[L] | E[QKL]AAK[ERQ]V[I]AE[KR] |
| | KR]S[AE]LE[RDK]R[KET]AR | AE[R]LAA[K]K[ER]N[KQE]G | E[RK]V[L]R[A]K[ER]LAK[E |
| | [E]E[KQ]AS[AHK]E[KN]R[K | DK[DSQ]E[DQ]VFK[QR]K[E | R]K[E]Q[KRE]GDE[DRS]E[D] |
| | DQ]GDE[DSQ]E[DQK]E[TK]F | DQ]AAE[KRD]S[TAV]ALE[K | V[L]Y[FR]E[K]K[ERQ]AR[EQ] |
| | R[KQ]K[EDR]AAE[RKQ]K[R | T]V[IL]AK[QE]R[ED]L[A]V | E[KDR]T[VA]AR[E]E[KRT]V |
| | TN]ALE[KDR]L[ITV]AK[QRE] | [A]E[KR]V[EQ]AS[KER]K[NE] | [IL]K[ETR]E[K]E[IR]L[A]K[E] |
| | R[K]L[A]V[A]E[KD]Q[ER] | E[Q]GD[N] (SEQ ID NO: 356) | R[EKH]V[EQ]R[A]E[KT]E[K |
| | AK[ERS]K[ENQ]E[QDK]GD | | NR]K[QE]G (SEQ ID NO: 357) |
| | [N] (SEQ ID NO: 355) | | |
| DHR72_design | DSTKEKARQLAEEAKETAE | SEKAKAILLAAEAARVAKE | SEKARAILEAAERAREAKER |
| | KVGDPELIKLAEQASQEGD | VGDPELIKLALEAARRGD | GDPEQIKKARELAKRG (SEQ |
| | (SEQ ID NO: 364) | (SEQ ID NO: 365) | ID NO: 366) |
| DHR72_variants | D[N]S[TD]T[DE]K[ETS]E[DK | S[R]E[KD]K[W]AK[ER]AI[V | S[AKR]E[DKR]K[QW]AR[ED] |
| | Q]K[ERD]AR[K]Q[EDK]L[RK] | A]L[K]L[R]AAE[K]AAR[KEL] | AI[VA]L[KR]E[RK]AAE[KR] |
| | AE[KND]E[K]AK[AQI]E[KH] | V[IT]AKE[KQ]V[T]GD[NS]P | R[KET]AR[KLE]E[K]AKE[KQ] |
| | T[IVS]AE[K]K[ER]V[TA]GD | E[D]LIK[R]LAL[REQ]E[KQ]A | R[EK]GD[SN]P[S]E[DNQ]Q |
| | [NS]PE[DHN]LI[K]K[ER]L[T] | AR[KE]R[EDN]GD (SEQ ID | [KRT]IK[EQ]K[ER]AR[EKQ]E |
| | AE[KQD]Q[EKR]AS[A]Q[KD | NO: 362) | KR]L[EK]AK[REQ]R[EK]G |
| | R]E[DQR]GD[N] (SEQ ID NO: | | (SEQ ID NO: 363) |
| | 361) | | |
| DHR73_design | DAEEEAKEAIKRAQEAIELA | AEVLALVAIALALVAIALAE | ARVLKLVAKALELVAEALK |
| | RKGNPEEARKVAEEARERA | VGNPEEAREVAERAKEIAER | KVGNPEEAREVEERAREIKE |
| | ERVREEAEKRGD (SEQ ID | VRELAEKRGD (SEQ ID NO: | RVRRLLEEKG (SEQ ID NO: |
| | NO: 370) | 371) | 372) |
| DHR73_variants | D[NS]A[SD]E[R]E[KR]A | AE[RK]V[A]LALVAIALALV | A[DIW]R[DEK]V[A]LK[EQR] |
| | KE[K]AIK[E]R[DK]AQ[K]E[R | AIALAE[QK]VGN[D]PE[D]E | LVAK[ER]ALE[K]LVAE[K]A |
| | K]AI[S]E[K]L[KDE]AR[KQE] | [S]AR[EYK]E[RK]VAE[RD]R | LK[RQ]K[QEN]VGN[D]PE[D] |
| | K[R]GN[D]PE[DK]E[SRT]AR | [EDT]AK[RYE]E[KRQ]I[LV]A | E[S]AR[EKT]E[KRS]VE[KQ]E |
| | [KE]K[E]V[TKE]AE[DR]E[DQ | E[QDR]R[E]V[A]R[EY]E[KR] | [RKQ]R[QDE]AR[EQK]E[KR] |
| | R]AR[EY]E[KR]R[ILD]AE[Q | L[EQ]AE[RQ]K[ER]R[QDN]G | I[VLT]K[QER]E[KRD]R[EDK] |
| | DK]R[EK]V[A]R[EAL]E[KR]E | D[N] (SEQ ID NO: 368) | V[A]R[KDE]R[KEQ]L[EIN]L |
| | [RKN]AE[RKQ]K[ER]R[KQ]G | | [AK]E[KRT]E[KR]K[RQN]G |
| | D[NS] (SEQ ID NO: 367) | | (SEQ ID NO: 369) |
| DHR74_design | DSEADRIIKKLQKFIKEVEQE | SEAIRIIKKLVKEITEVVREA | QEAIKRIKKLVKKIIEVVRK |
| | ARDSNDDEERELLKRLAEA | RKSTDKEEIELLIRLAEALAR | ARKSTNKKEIEKLIRKAEKL |
| | LKRAAEAVKRAQESGD | AAEAVADAAKSGD (SEQ ID | ARKAEQIAEDAKRG (SEQ |
| | (SEQ ID NO: 376) | NO: 377) | ID NO: 378) |
| DHR74_variants | D[N]S[TDN]E[DQT]AD[KEN] | S[QDE]E[QR]AI[L]R[KED]I[L] | Q[ED]E[DS]AI[L]K[EDR]R[K |
| | R[KE]I[L]I[AR]K[ED]K[RQ]L | IK[R]K[EQS]LV[A]K[EHR]E | T]IK[E]K[EQR]LV[A]K[ER]K |
| | Q[KE]K[RE]E[ALQ]IK[ED]E | [ADL]IT[IL]E[KR]V[IL]V[AI]R | [RN]II[LS]E[KQ]V[ILK]V[AI]R |
| | [KR]V[IL]E[QK]Q[EKR]E[KN | [EQK]E[R]AR[DET]K[R]S[AE | [EKQ]K[EQR]AR[EKN]K[RE |
| | Q]AR[KEN]D[KRE]S[EAR]N | Q]TDK[EPQ]E[DN]E[RK]IE[K | N]S[AEK]T[N]N[D]K[EPQ]K |
| | [T]D[N]D[SPQ]E[TD]E[KLQ]R | HR]LLI[V]R[KDL]LAEAL[A] | [ETD]E[KQR]IE[KR]K[E]L[KR] |
| | [IQ]E[KD]LLK[Q]R[KL]LAEA | ARAAEAV[A]AD[KRE]AAK | I[V]R[EKQ]K[E]AE[KQ]K[E |
| | L[A]K[QER]R[I]AAE[DKR]A | [EQ]S[TAK]GD[N] (SEQ ID | D]L[A]AR[DK]K[RE]AEQ[EN |
| | V[A]K[QDE]R[IEK]AQ[AER] | NO: 374) | R]I[AEL]AE[KR]D[RK]AK[E |
| | E[KDQ]S[TQA]GD(SEQ ID | | QR]R[KED]G (SEQ ID NO: |
| | NO: 373) | | 375) |
| DHR75_design | DSEKEKATELAERAQDVAS | SEKAKAILLAAKAVLVAVE | SEKARAILEAAREVLRAVEQ |
| | RVEEEARREGSRELIEIAREL | VYERAKRQGSDELREIAREL | YERAKRRGDDDERERAREE |
| | RERAEEASQEGD (SEQ ID | AKEALRAAQEGD (SEQ ID | AREALERAREG (SEQ ID NO: |
| | NO: 382) | NO: 383) | 384) |
| DHR75_variants | D[N]S[DNT]E[DKT]K[ES]E[D | S[APE]E[KDS]K[AR]AK[FLD] | S[APE]E[DKS]K[R]AR[EDQ] |
| | K]K[ERT]AT[KR]E[KRH]L[K | AI[V]L[AKR]L[KRE]AAK[E | AI[V]L[AKR]E[RKQ]AAR[KE |
| | ER]AE[KN]R[KE]AQ[IK]D[K | DL]AVL[KRA]V[ILT]AV[IA] | Q]E[KAR]VL[KAR]R[EKQ]A |
| | E]V[LTI]AS[KEQ]R[EKQ]V[A] | E[QR]V[A]YE[RK]R[LEK]AK | V[IA]E[QRK]Q[EKN]YE[SKA] |
| | E[LKR]E[KR]E[LR]AR[DKQ] | [RH]R[EKQ]Q[EN]GSD[ES]E | R[KET]AK[RDS]R[KE]R[KE] |
| | R[KEQ]E[TDQ]GSR[DSE]E[D | [DTK]LR[KQ]E[KNQ]IAR[EK | GD[S]D[ES]D[E]E[KDR]R[QA |
| | K]LI[EKA]E[KQN]IAR[EKQ] | Q]E[RKQ]LAK[RE]E[L]ALR | E]E[RKQ]R[KE]AR[EKN]E[R |
| | E[KQR]LR[AE]E[KR]R[LEQ] | [KEQ]AAQ[KR]E[R]GD (SEQ | DK]E[KR]AR[KE]E[KQ]ALE |
| | AE[K]E[KQR]AS[A]Q[ER]E | ID NO: 380) | [KR]R[EK]AR[KQ]E[R]G (SEQ |
| | [RK]GD[N] (SEQ ID NO: 379) | | ID NO: 381) |
| DHR76_design | NPELEEWIRRAKEVAKEVE | PELVEWVARAAKVAAEVIK | PELVERVARLAKKAAELIKR |
| | KVAQRAEEEGNPDLRDSAK | VAIQAEKEGNRDLFRAALEL | AIRAEKEGNRDERREALERV |
| | ELRRAVEEAIEEAKKQGN | VRAVIEAIEEAVQGN (SEQ | REVIERIEELVRQG (SEQ ID |
| | (SEQ ID NO: 388) | ID NO: 389) | NO: 390) |
| DHR76_variants | N[DS]P[NDS]E[KDR]L[RT]E | P[WAS]E[KRD]LV[A]E[KR] | P[WA]E[KD]LV[A]E[KQR]R |
| | [KQ]E[K][A]I[DK]R[KD]R[E | W[A]VAR[EK]AAK[EQR]V[A] | [EKT]VAR[EKD]L[REK]AK[E |
| | K]AK[QEN]E[KRQ]V[A]AK[E | AA[V]E[KLR]V[A]I[L]K[EQ | R]K[EQ]AA[V]E[KQ]L[VAE]I |
| | ND]E[KD]V[A]E[KQR]K[E]V | R]V[LQA]AI[EL]Q[KER]A[L] | [L]K[EQ]R[KEH]AI[LE]R[EK] |
| | [LQA]AQ[KE]R[K]A[L]E[KQR] | E[QKA]K[N]E[DSN]GNR[PE | A[DL]E[QKH]K[NRQ]E[NRK] |
| | E[KRN]E[NSQ]GN[D]P[DE]D | K]D[KET]LF[ART]R[KED]A | GN[D]R[PEK]D[EK]E[KRD]R |
| | [EK]LR[AT]D[RNE]S[ALI]AK | [LV]AL[AIR]E[KR]LVR[EK]A | [AT]R[EKD]E[KR]A[N]L[AE |
| | [ENR]E[KR]LR[VIK]R[EKD] | V[I]IE[RK]AIE[KR]E[KR]AV | K]E[KR]R[KET]VR[EKD]E[K |
| | AV[I]E[QRK]E[R]AIE[KR]E | [A]K[DE]Q[K]GN[DS] (SEQ ID | N]V[I]IE[KRQ]R[TEK]IE[K]E |
| | [QR]AK[QRS]K[REN]Q[ER]G | NO: 386) | [K]L[AS]V[A]R[KDS]Q[EKR] |
| | N[DS] (SEQ ID NO: 385) | | G (SEQ ID NO: 387) |
| DHR77_design | NSDEEEAREWAERAEEAAK | SEEAEAVYWAARAVLAALE | PEEARAVYEAARDVLEALQ |
| | EALEQAKREGDEDARRVAE | ALEQAKREGDEDARRVAEE | RLEEAKRRGDEEERREAEER |
| | ELEKQAEEARRKKD (SEQ | LLRQAEEAARKKN (SEQ ID | LRQAEERARKK (SEQ ID |
| | ID NO: 34) | NO: 395) | NO: 396) |
| DHR77_variants | N[D]S[T]D[ER]E[DK]E[KDQ] | S[ARQ]E[DKS]E[LT]AE[AKQ] | P[KAE]E[KDS]E[TQD]AR[ED |
| | E[KN]AR[QK]E[KQR]W[A]A | AVY[A]W[A]A[V]AR[LEK]A | N]AVY[A]E[KRD]A[V]AR[K |
| | [V]E[DRK]R[EK]AE[KR]E[RK] | V[AI]L[A]A[L]ALE[KQR]ALE | E]D[AEK]V[AI]L[YAK]E[KR] |
| | A[L]AK[QRD]E[KR]AL[EK] | [L]Q[L]AK[Q]R[E]E[Q]GDE | ALO[ERK]R[EK]L[Y]E[HIK]E |
| | E[K]Q[EKL]AK[QRE]R[K]E | [D]D[QK]AR[IQE]R[EK]V[L]A | [KQR]AK[ER]R[K]R[KED]GD |
| | [QR]GDE[D]D[QRE]AR[ILE]R | E[RKQ]E[RK]LLR[KE]Q[L]A | [N]E[DKQ]E[DK]E[ADK]R[K |
| | [KE]V[L]AE[KQD]E[RQ]LE[R | E[R]E[K]AA[L]R[EK]K[N]K | QI]R[KEQ]E[KRS]AE[KR]E[K |
| | L]K[ER]Q[ELR]AE[KRD]E[K] | [N]N[D] (SEQ ID NO: 392) | DR]R[EKN]LR[KE]Q[KER]AE |
| | AR[EKA]R[EK]K[N]K[NHQ] | | [KR]E[KR]R[AKN]A[Q]R[ED |
| | D[NS] (SEQ ID NO: 391) | | K]K[NR][NEH] (SEQ ID NO: |
| | | | 393) |
| DHR79_design | SSDEEEARELIERAKEAAER | SDVNEALKLIVEAIEAAVRA | EEVNEALKKIVKAIQEAVES |
| | AQEAAERTGDPRVRELARE | LEAAERTGDPEVRELARELV | LREAEESGDPEKREKARERV |
| | LKRLAQEAAEEVRDPSS | RLAVEAAEEVQNPSS (SEQ | REAVERAEEVQRDPS (SEQ |
| | (SEQ ID NO: 400) | ID NO: 401) | ID NO: 402) |
| DHR79_variants | S[ND]S[DTN]D[E]E[DK]E[KD] | S[DKE]D[N]V[A]N[RV]E[RK] | E[DKQ]E[DS]V[AS]N[VA]E[R |
| | E[KRT]AR[EK]E[KR]L[RAE] | AL[A]K[ED]L[R]I[V]V[IL]E[K | DK]AL[A]K[E][ER]I[V]V[IL] |
| | I[TK]E[R]R[KE]AK[EQ]E[K | R]AIE[K]AAVR[EAK]ALE[K] | K[RQ]A[L]IQ[EKD]E[DK]AV |
| | R]AA[S]E[KRD]R[EKL]AQ[E | AAE[IKN]R[KQ]T[V]GDPE[K | E[RKQ]S[A]LR[EKQ]E[KNR] |
| | KN]E[QR]AAE[KNR]R[EKN] | RN]V[A]R[I]E[K]LAR[AV]E | AE[NKQ]E[RD]S[KTE]GD |
| | T[A]GDPR[KNT]V[A]R[IK]E | [KR]LVR[EQ]LAVE[RK]AAE | [N]PE[NQ]K[EQ]R[IKQ]E[K]K |
| | [K]LAR[KE]E[KR]LK[SRV]R | [K]E[RKN]VQ[WLD]R[EK]N | [RE]AR[AV]E[KR]R[EKQ]VR |
| | [ED]LAQ[EKR]E[RKN]AAE[K | [D]PS[RK]S[DN] (SEQ ID NO: | [E]E[KR]AVE[RK]R[KET]AE |
| | R]E[QRD]VK[QE]R[K]DPS[R | 398) | [QK]E[K]V[I]Q[HLA]R[KN]DP |
| | T]S[ND] (SEQ ID NO: 397) | | S[NRT] (SEQ ID NO: 399) |
| DHR80_design | NSEELERESEEAERRLQEAR | SEEAERASEKAQRVLEEAR | KEEAERAYEDARRVEEEAR |
| | KRSEEARERGDLKELAEALI | KVSEEAREQGDDEVLALALI | KVKESAEEQGDSEVKRLAE |
| | EEARAVQELARVASERGN | AIALAVLALAEVASSRGN | EAEQLAREARRHVQETRG |
| | (SEQ ID NO: 406) | (SEQ ID NO: 407) | (SEQ ID NO: 408) |
| DHR80_variants | N[SD]S[TD]E[DK]E[DKQ]L[A | S[RDK]E[DKQ]E[TLA]AE[DK | K[QSR][DKS]E[KTA]AE[KD |
| | D]E[KRQ]R[KE]E[RN]S[EAH] | Q]R[EKQ]AS[AEK]E[KR]K[R | R]R[EK]AY[AEK]E[KRQ]D[K |
| | E[KR]E[KD]AE[KQR]R[KE]R | EW]AQ[EKR]R[KQE]VL[YAE] | ER]AR[EKQ]R[EKQ]VE[KYA] |
| | [EKD]L[YAE]Q[REK]E[KR]A | E[KRQ]E[QDK]AR[EKQ]K[E] | E[KR]E[RKS]AR[EKS]K[E]V |
| | R[KE]K[E]R[EK]S[A]E[K]E[K | V[I]S[A]E[KRD]E[KRQ]AR[E | [I]K[AR]E[RK]S[EQR]AE[KD |
| | R]AR[KEQ]E[KR]R[KQT]GD | K]E[K]Q[KEN]GD[N]D[LYE] | Q]E[KR]Q[KN]GD[N]S[DEQ] |
| | LK[REQ]E[TAK]L[AEK]AE[K] | E[RQK]V[A]L[A]ALALIAI[A | E[K]V[A]K[LYA]R[KND]LAE |
| | ALIE[KRI]E[RIA]AR[QKD]A | RQ]AL[Q]AV[A]L[AV]AL[IK | [KNQ]E[TKR]AE[IAR]Q[EKN] |
| | V[A]Q[KAE]E[KIR]L[IAK]AR | A]AE[ILV]V[A]AS[AEK]S[A] | L[K]AR[EKD]E[RK]AR[IKA] |
| | [EK]V[A]AS[KAE]E[RKD]R | R[EKS]GN[DS] (SEQ ID NO: | R[KQE]H[ILQ]V[A]Q[KAD]E |
| | [KEA]GN[SD] (SEQ ID NO: | 404) | [KRD]T[SA]R[KQS]G (SEQ ID |
| | 403) | | NO: 405) |
| DHR82_design | NDEEVQEAVERAEELREEA | DEAVETAVRLARELKVAE | EEAVETAKRLAEELRKVAE |
| | EELIKKARKTGDPELLRAL | ELQERAKKTGDPELLKLAL | LLEERAKETGDPELQELAKR |
| | EALEEAVRAVEEAIKRNPDN | RALEVAVRAVELAIKSNPD | AKEVADRARELAKKSNPN |
| | (SEQ ID NO: 412) | N (SEQ ID NO: 413) | (SEQ ID NO: 414) |
| DHR82_variants | N[D]D[TS]E[DR]E[DR]V[AD] | D[EKS]E[DK]AV[A]E[KNR]T | E[KQR]E[DRK]AV[A]E[KDR] |
| | Q[KE]E[KRQ]A[KL]V[ANQ]E | [AIL]A[L]V[ANQ]R[EDK]L[I | T[AIL]A[L]K[QEA]R[EKS]L[I |
| | [RK]R[KDE]AE[QRD]E[RQK] | AV]AR[EKQ]E[LDR]L[A]K[A | AV]AE[KQR]E[LRA]L[A]R[K |
| | L[A]R[AEI]E[KR]E[KD]AE[R | QI]K[ER]V[AI]AE[KQR]E[DK | EQ]K[RES]V[AI]AE[KR]L[DE |
| | KQ]E[K]L[AW]I[AEQ]K[DER] | L]L[A]Q[IAE]E[KQR]R[LEI]A | T]L[A]E[K]E[KRD]R[LIQ]AK |
| | K[E]AR[KEQ]K[E]T[EK]G[N] | K[REQ]K[RD]T[E]GD[NTS]P | [QER]E[KR]T[HQ]G[N]D[TNS] |
| | D[TNS]P[T]E[DTQ]L[AK]LR | [T]E[QRT]L[A]LK[RDE]L[EK | P[ERS]E[TDR]L[A]Q[EK]E[K |
| | [KDE]K[E]AL[IVA]E[R]A[KR | W]AL[IVA]R[EK]AL[V]E[KI] | N]L[AKI]AK[EQ]R[EKD]AK |
| | W]L[V]E[IKR]E[KR]AV[AI]R | V[AL]AV[AI]R[KEQ]AV[A]E | [ER]E[KR]V[AL]AD[KNR]R[E |
| | [EK]A[L]V[A]E[AKR]E[QKR] | [A]L[AEI]AI[L]K[RE]S[A]N[D | K]AR[EKQ]E[KQ]L[AEI]AK |
| | AI[L]K[RD]R[DQE]N[DER]P | RE]PD[NSE]N[D] (SEQ ID | [RQ]K[RDE]S[A]N[DRS]PN[D |
| | D[RGN]N[D] (SEQ ID NO: | NO: 410) | ST] (SEQ ID NO: 411) |
| | 409) | | |

[0240] In another embodiment, the polypeptide comprises or consists of the amino acid sequence selected from the group consisting of:
[0241] (A) SEQ ID NO:4-[SEQ ID NO:5]_{(0 or 2-19)}-SEQ ID NO:6;
[0242] (B) SEQ ID NO:10-[SEQ ID NO:11]_{(0 or 2-19)}-SEQ ID NO:12;
[0243] (C) SEQ ID NO:16-[SEQ ID NO:17]_{(0 or 2-19)}-SEQ ID NO:18;
[0244] (D) SEQ ID NO:22-[SEQ ID NO:23]_{(0 or 2-19)}-SEQ ID NO:24;
[0245] (E) SEQ ID NO:28-[SEQ ID NO:29]_{(0 or 2-19)}-SEQ ID NO:30;
[0246] (F) SEQ ID NO:34-[SEQ ID NO:35]_{(0 or 2-19)}-SEQ ID NO:36;
[0247] (G) SEQ ID NO:40-[SEQ ID NO:41]_{(0 or 2-19)}-SEQ ID NO:42;
[0248] (H) SEQ ID NO:46-[SEQ ID NO:47]_{(0 or 2-19)}-SEQ ID NO:48;
[0249] (I) SEQ ID NO:52-[SEQ ID NO:53]_{(0 or 2-19)}-SEQ ID NO:54;
[0250] (J) SEQ ID NO:58-[SEQ ID NO:59]_{(0 or 2-19)}-SEQ ID NO:60;
[0251] (K) SEQ ID NO:64-[SEQ ID NO:65]_{(0 or 2-19)}-SEQ ID NO:66;
[0252] (L) SEQ ID NO:70-[SEQ ID NO:71]_{(0 or 2-19)}-SEQ ID NO:72;
[0253] (M) SEQ ID NO:76-[SEQ ID NO:77]_{(0 or 2-19)}-SEQ ID NO:78;
[0254] (N) SEQ ID NO:82-[SEQ ID NO:83]_{(0 or 2-19)}-SEQ ID NO:84;
[0255] (O) SEQ ID NO:88-[SEQ ID NO:89]_{(0 or 2-19)}-SEQ ID NO:90;
[0256] (P) SEQ ID NO:94-[SEQ ID NO:95]_{(0 or 2-19)}-SEQ ID NO:96;
[0257] (Q) SEQ ID NO:100-[SEQ ID NO:101]_{(0 or 2-19)}-SEQ ID NO:102;
[0258] (R) SEQ ID NO:106-[SEQ ID NO:107]_{(0 or 2-19)}-SEQ ID NO:108;
[0259] (S) SEQ ID NO:112-[SEQ ID NO:113]_{(0 or 2-19)}-SEQ ID NO:114;
[0260] (T) SEQ ID NO:118-[SEQ ID NO:119]_{(0 or 2-19)}-SEQ ID NO:120;
[0261] (U) SEQ ID NO:124-[SEQ ID NO:125]_{(0 or 2-19)}-SEQ ID NO:126;
[0262] (V) SEQ ID NO:130-[SEQ ID NO:131]_{(0 or 2-19)}-SEQ ID NO:132;
[0263] (W) SEQ ID NO:136-[SEQ ID NO:137]_{(0 or 2-19)}-SEQ ID NO:138;
[0264] (X) SEQ ID NO:142-[SEQ ID NO:143]_{(0 or 2-19)}-SEQ ID NO:144;
[0265] (Y) SEQ ID NO:148-[SEQ ID NO:149]_{(0 or 2-19)}-SEQ ID NO:150;
[0266] (Z) SEQ ID NO:154-[SEQ ID NO:155]_{(0 or 2-19)}-SEQ ID NO:156;
[0267] (AA) SEQ ID NO:160-[SEQ ID NO:161]_{(0 or 2-19)}-SEQ ID NO:162;
[0268] (BB) SEQ ID NO:166-[SEQ ID NO:167]_{(0 or 2-19)}-SEQ ID NO:168;
[0269] (CC) SEQ ID NO:172-[SEQ ID NO:173]_{(0 or 2-19)}-SEQ ID NO:174;
[0270] (DD) SEQ ID NO:178-[SEQ ID NO:179]_{(0 or 2-19)}-SEQ ID NO:180;
[0271] (EE) SEQ ID NO:184-[SEQ ID NO:195]_{(0 or 2-19)}-SEQ ID NO:186;
[0272] (FF) SEQ ID NO:190-[SEQ ID NO:191]_{(0 or 2-19)}-SEQ ID NO:192;
[0273] (GG) SEQ ID NO:196-[SEQ ID NO:197]_{(0 or 2-19)}-SEQ ID NO:198;
[0274] (HH) SEQ ID NO:202-[SEQ ID NO:203]_{(0 or 2-19)}-SEQ ID NO:204;
[0275] (II) SEQ ID NO:208-[SEQ ID NO:209]_{(0 or 2-19)}-SEQ ID NO:210;
[0276] (JJ) SEQ ID NO:214-[SEQ ID NO:215]_{(0 or 2-19)}-SEQ ID NO:216;
[0277] (KK) SEQ ID NO:220-[SEQ ID NO:221]_{(0 or 2-19)}-SEQ ID NO:222;
[0278] (LL) SEQ ID NO:226-[SEQ ID NO:227]_{(0 or 2-19)}-SEQ ID NO:228;
[0279] (MM) SEQ ID NO:232-[SEQ ID NO:233]_{(0 or 2-19)}-SEQ ID NO:234;
[0280] (NN) SEQ ID NO:238-[SEQ ID NO:239]_{(0 or 2-19)}-SEQ ID NO:240;
[0281] (OO) SEQ ID NO:244-[SEQ ID NO:245]_{(0 or 2-19)}-SEQ ID NO:246;
[0282] (PP) SEQ ID NO:250-[SEQ ID NO:251]_{(0 or 2-19)}-SEQ ID NO:252;
[0283] (QQ) SEQ ID NO:256-[SEQ ID NO:257]_{(0 or 2-19)}-SEQ ID NO:258;
[0284] (RR) SEQ ID NO:262-[SEQ ID NO:263]_{(0 or 2-19)}-SEQ ID NO:264;
[0285] (SS) SEQ ID NO:268-[SEQ ID NO:269]_{(0 or 2-19)}-SEQ ID NO:270;
[0286] (TT) SEQ ID NO:274-[SEQ ID NO:275]_{(0 or 2-19)}-SEQ ID NO:276;
[0287] (UU) SEQ ID NO:280-[SEQ ID NO:281]_{(0 or 2-19)}-SEQ ID NO:282;
[0288] (VV) SEQ ID NO:286-[SEQ ID NO:287]_{(0 or 2-19)}-SEQ ID NO:288;
[0289] (WW) SEQ ID NO:292-[SEQ ID NO:293]_{(0 or 2-19)}-SEQ ID NO:294;
[0290] (XX) SEQ ID NO:298-[SEQ ID NO:299]_{(0 or 2-19)}-SEQ ID NO:300;
[0291] (YY) SEQ ID NO:304-[SEQ ID NO:305]_{(0 or 2-19)}-SEQ ID NO:306;
[0292] (ZZ) SEQ ID NO:310-[SEQ ID NO:311]_{(0 or 2-19)}-SEQ ID NO:312;
[0293] (AAA) SEQ ID NO:316-[SEQ ID NO:317]_{(0 or 2-19)}-SEQ ID NO:318;
[0294] (BBB) SEQ ID NO:322-[SEQ ID NO:323]_{(0 or 2-19)}-SEQ ID NO:324;
[0295] (CCC) SEQ ID NO:328-[SEQ ID NO:329]_{(0 or 2-19)}-SEQ ID NO:330;
[0296] (DDD) SEQ ID NO:334-[SEQ ID NO:335]_{(0 or 2-19)}-SEQ ID NO:336;
[0297] (EEE) SEQ ID NO:340-[SEQ ID NO:341]_{(0 or 2-19)}-SEQ ID NO:342;
[0298] (FFF) SEQ ID NO:346-[SEQ ID NO:347]_{(0 or 2-19)}-SEQ ID NO:348;
[0299] (GGG) SEQ ID NO:352-[SEQ ID NO:353]_{(0 or 2-19)}-SEQ ID NO:354;
[0300] (HHH) SEQ ID NO:358-[SEQ ID NO:359]_{(0 or 2-19)}-SEQ ID NO:360;
[0301] (III) SEQ ID NO:364-[SEQ ID NO:365]_{(0 or 2-19)}-SEQ ID NO:366;
[0302] (JJJ) SEQ ID NO:370-[SEQ ID NO:371]_{(0 or 2-19)}-SEQ ID NO:372;
[0303] (KKK) SEQ ID NO:376-[SEQ ID NO:377]_{(0 or 2-19)}-SEQ ID NO:378;
[0304] (LLL) SEQ ID NO:382-[SEQ ID NO:383]_{(0 or 2-19)}-SEQ ID NO:384;
[0305] (MMM) SEQ ID NO:388-[SEQ ID NO:389]_{(0 or 2-19)}-SEQ ID NO:390;
[0306] (NNN) SEQ ID NO:394-[SEQ ID NO:395]_{(0 or 2-19)}-SEQ ID NO:396;
[0307] (OOO) SEQ ID NO:400-[SEQ ID NO:401]_{(0 or 2-19)}-SEQ ID NO:402;
[0308] (PPP) SEQ ID NO:406-[SEQ ID NO:407]_{(0 or 2-19)}-SEQ ID NO:408; and
[0309] (QQQ) SEQ ID NO:412-[SEQ ID NO:413]_{(0 or 2-19})-SEQ ID NO:414;
[0310] wherein the domain in brackets is ah optional internal domain.

[0311] The polypeptides of this embodiment include 2 or 3 domains (as described above), and are represented in Table 1 above, reflected in each row showing listed as “DHRx_design” (where x is replaced by a specific number in the table).

[0312] In one embodiment of any aspect or embodiment of the polypeptides, the internal domain is absent. In certain alternative embodiments, the polypeptides according to this aspect further comprise at least one of an N_{cap} domain coupled to the N-terminus of the at least two Internal domains and a C_{cap} domain coupled to the C-terminus of the at least two Internal domains. In certain embodiments, the optional internal domain is present in 2-19 copies. In certain specific embodiments, the optional internal domain is present in 2-3 copies.

[0313] In another aspect, the invention provides polypeptides comprising or consisting of a polypeptide having at least 50% identity over its length with a polypeptide having the amino acid sequence selected from the group consisting of SEQ ID NO: 415-497 (see Table 2). The polypeptides of this aspect of the invention represent novel repeat proteins with precisely specified, geometries identified using the methods of the invention, opening up a wide array of new possibilities for biomolecular engineering. In various embodiments, the polypeptides comprise or consist of a polypeptide having at least 55%, 60%, 65%, 70%, 75%, 80%, 85%, 90%, 95%, 96%, 97%, 98%, 99%, or 100% identity over its length with a polypeptide having the amino acid sequence selected from the group consisting of SEQ ID NO: 415-497.

TABLE 2

| Name | Sequence |
|---|---|
| DHR1 | GCDQVAKDASSTIREVIEKNPNYSEKVADVAAKIVKKIIEGNPNGC |
| | DCVAKAASSIIRAVIEKKPNYSEVVADVAAAIVKAIIEGNPNGCDCVA |
| | KAASSIIRAVIEKNPNYSEVVADVAAAIVKAIIEGNPNGRDCVRKAAS |
| | SIIRAVQEKNPNYSEVVEDVKRAIEKAIKEGNPN (SEQ ID NO: 415) |
| DHR2 | SDADEAAKEANKAENKARNRNDDEAAKAVKLIKEAIERAKKRNESD |
| | AVEAAKEAAKALNKALNRNDDEAAKAVALIAEAIIRAEKRNESDAVE |
| | AAKEAAKALNKALNRNDDEAAKAVALIAEAIIRALKRNESDAVEKAK |
| | EAAKNLNKALNRNDDEQAKHVAKQAENIIRALKRNES (SEQ ID NO: |
| | 416) |
| DHR3 | SSEDTVRKIAQKCSEAIRESDCEEAARKCAKTISEAIRESNSSELAVRI |
| | IAQVCSEAIRESNDCECAARICAKIISEAIRESNSSELAVRIIAQVCSEAIR |
| | ESNDCECAARICAKIISEAIRESNSSELAKRIIKQVCSEAKRESNDTECA |
| | KRICTKIKSEAKRESNS (SEQ ID NO: 417) |
| DHR4 | SYEDECEEKARRVAEKVERLKRSGTSEDEIAEEVAREISEVIRTLKESG |
| | SSYEVICECVARIVAEIVEALKRSGTSEDEIAEIVARVISEVIRTLKESGS |
| | SYEVICECVARIVAEIVEALKRSGTSEDEIAEIVARVISEVIRTLKESGSS |
| | YEVIKECVQRIVEEIVEALKRSGTSEDEINEIVRRVKSEVERTLKESGSS |
| | (SEQ ID NO: 418) |
| DHR5 | SSEKEELRERLVKICVENAKRKGDDTEEAREAAREAFELVREAAERA |
| | GIDSSEVLELAIRLIKECVENAQREGYDISEACRAAAEAFKRVAEAAK |
| | RAGITSSEVLELAIRLIKECVENAQREGYDISEACRAAAEAFKRVAEAA |
| | KRAGITSSETLKRAIEEIRKRVEEAQREGNDISEACRQAAEEFRKKAEE |
| | LKRRGD (SEQ ID NO: 419) |
| DHR6 | SEEKEEALKKVREAAKKLGSSDEEARKCFEEAREWAERTGSSAYEAA |
| | EALFKVLEAAYKLGSSAEEACECFNQAAEWAERTGSGAYEAAEALFK |
| | VLEAAYKLGSSAEEACECFNQAAEWAERTGSGAYEAAERLFEELERA |
| | YEEGSSAEEACEEFNKKEEEAHRKGKK (SEQ ID NO: 420) |
| DHR7 | STKEDARSTCEKAARKAAESNDEEVAKQAAKDCLEVAKQAGMPTKE |
| | AARSFCEAAARAAAESNDEEVAKIAAKACLEVAKQAGMPTKEAARS |
| | FCEAAARAAAESNDEEVAKIAAKACLEVAKQAGMPTKEAARSFCEA |
| | AKRAAKESNDEEVEKIAKKACKEVAKQAGMP (SEQ ID NO: 421) |
| DHR8 | SDEMKKVMEALKKAVELAKKNNDDEVAREIERAAKEIVEALRENNS |
| | DEMAKVMLALAKAVLLAAKNNDDEVAREIARAAAEIVEALRENNSD |
| | EMAKVMLALAKAVLLAAKNNDDEVAREIARAAAEIVEALRENNSDE |
| | MAKKMLELAKRVLDAAKNNDDETAREIARQAAEEVEADRENNS |
| | (SEQ ID NO: 422) |
| DHR9 | SYEDEAEEKARRVAEKVERLKRSGTSEDEIAEEVAREISEVIRTLKESG |
| | SSYEVIAEIVARIVAEIVEALKRSGTSEDEIAEIVARVISEVIRTLKESGSS |
| | YEVIAEIVARIVAEIVEALKRSGTSEDEIAEIVARVISEVIRTLKESGSSY |
| | EVIKEIVQRIVEEIVEALKRSGTSEDEINEIVRRVKSEVERTLKESGSS |
| | (SEQ ID NO: 423) |
| DHR10 | SSEKEELRERLVKIVVENAKRKGDDTEEAREAAREAFELVREAAERA |
| | GIDSSEVLELAIRLIKEVVENAQREGYDISEAARAAAEAFKRVAEAAK |
| | RAGITSSEVLELAIRLIKEVVENAQREGYDISEAARAAAEAFKRVAEA |
| | AKRAGITSSETLKRAIEEIRKRVEEAQREGNDISEAARQAAEEFRKAE |
| | ELKRRGD (SEQ ID NO: 424) |
| DHR11 | SDADEAAKEANKAENKARNRNDDEAAKAVKLCKEAIERAKKRNESD |
| | AVEAAKEAAKALNKALNRNDDEAAKAVALCCEAIIRALKRNESDAV |
| | EAAKEAAKALNKALNRNDDEAAKAVALCCEAIIRALKRNESDAVEK |
| | AKEAAKNLNKALNRNDDEQAKHVAKQCENIIRALKRNES (SEQ ID |
| | NO: 425) |
| DHR12 | DDEEQCREIAEKAKQTYTDDEEIARIIAEAARQTTTDDEEICRCIAEAA |
| | KQTYTDDEEIARIIAYAARQTTTDDEEICRCIAEAAKQTYTDDEEIARII |
| | AYAARQTTTDDEEIERCIEEAAKQTYTDDEEIERIKEYARRQTTTD |
| | (SEQ ID NO: 426) |
| DHR13 | NAEDKAREVLKELKDEGSPEEEAARQVLKDLNREGSNAEDAARAVL |
| | KALKDEGSPEEEAARAVLKALNREGSNAEDAARAVLKALKDEGSPEE |
| | EAARAVLKALNREGSNEEDASRAVLKALKDEGSPEEEARRAVEKALN |
| | REGSN (SEQ ID NO: 427) |
| DHR14 | DSEEVNERVKQLAEKAKEATDKEEVIEIVKELAELAKQSTDSELVNEI |
| | VXQLAEVAKEATDKELVIYIVKILAELAKQSTDSELVNEIVKQLAEVA |
| | KEATDKELVIYIVKILAELAKQSTDSELVNEIVKQLEEVAKEATDKEL |
| | VEHIEKILEELKKQSTD (SEQ ID NO: 428) |
| DHR15 | NDERQKQREEVRKLAEELASKATDEELIKEIKKCAQLAEELASRSTND |
| | ELIKQILEVAKLAFELASKATDEELIKEILKCCQLAFELASRSTNDELIK |
| | QILEVAKLAFELASKATDEELIKEILKCCQLAFELASRSTNDEEIKQILE |
| | TAKEAFERASKATDEEEIKEILKKCQEKFEKKSRSTN (SEQ ID NO: 429) |
| DHR16 | NDKAKEAEELLRKALEKAEKENDETAIRCVELLKEALERAKKNNNDK |
| | AIEAVELLAKALEKALKENDETAIRCVCLLAEALLRALKNNNDKAIEA |
| | VELLAKALEKALKENDETAIRCVCLLAEALLRALKNNNDKAIEEVER |
| | LAKELEKAEKENDETKIREVCERAEELLRRLKNNN (SEQ ID NO: 430) |
| DHR17 | SSEDAREKIEQLCREAKEIAERAKQQNSQEEAREAIEKLLRIAKRIAEL |
| | AKQANQSEVAREAIECLCRIAKLIAELAKQANSQEVAREAIEALLRIAK |
| | LIAELAKQANQSEVAREAIECLCRIAKLIAELAKQANSQEVAREAIEAL |
| | LRIAKLIAELAKQANQSEVAREAIECLSRIAKLIEELAKQANSQEVKRE |
| | AQEALDRIQKLIEELQKQANQ (SEQ ID NO: 431) |
| DHR18 | DIEKLCKKAESEAREARSKAEELRQRHPDSQAARDAQKLASQAEEAV |
| | KLACELAQEHPNADIAKLCIKAASEAAEAASKAAELAQRHPDSQAAR |
| | DAIKLASQAAEAVKLACELAQEHPNADIAKLCIKAASEAAEAASKAA |
| | ELAQRHPDSQAARDAIKLASQAAEAVKLACELAQEHPNADIAKKCIK |
| | AASEAAEEASKAAEEAQRHPDSQKARDEIKEASQKAEEVKERCERAQ |
| | EHPNA (SEQ ID NO: 432) |
| DHR19 | DEIEKVREEAEKLKKKTDDEDVLEVAREAIRAAKEATSDEILKVIKEA |
| | LKLAKKTTDKDVLEVAREAIRAAEEATDDEILKVIKEALKLAKKTTD |
| | KDVLEVAREAIRAAEEATDEEILKEIKEALKKAKETTDTEELEKAREQI |
| | RKAEESTD (SEQ ID NO: 433) |
| DHR20 | SDIEEIRQLAEELRKKSDNEEVRKLAQEAAELAKRSTDSDVLEIVKDA |
| | LELAKQSTNEEVIKLALKAAVLAAKSTDSDVLEIVKDALELAKQSTNE |
| | EVIKLALKAAVLAAKSTDEEVLEEVKEALRRAKESTDEEEIKEELRKA |
| | VEEAESTD (SEQ ID NO: 434) |
| DHR21 | SEKEKVEELAQRIREQLPDTELAREAQELADEARKSDDSEALKVVYL |
| | ALRIVQQLPDTELAREALELAKEAVKSTDSEALKVVYLALRIVQQLPD |
| | TELAREALELAKEAVKSTDQEALKSVYEALQRVQDKPNTEEARESLE |
| | RAKEDVKSTD (SEQ ID NO: 435) |
| DHR22 | DDAEELRERARDLLRKNGSSEEEIKKVDEELEKIVRKADSDDAVKLA |
| | VKAAALLAENGSSAEEIVKVLEELLKIVEKADSDDAVKLAVKAAALL |
| | AENGSSAEEIVKVLEELLKIVEKADSEEEVKDAVREAAELAERGSSAE |
| | EIRKQLKDRLRKVEESDS (SEQ ID NO: 436) |
| DHR23 | SDSEKLAKRVLKELKRRGTSDEELERMKRELEKIIKSATSSDAMRLAL |
| | RVVLELVRRGTSSEILEKMMRMLIKIIQSATSSDAMRLALRVVLELVR |
| | RGTSSEILEKMMRMLIKIIQSATSDDQMREALRQVLEEVRKGTSSEQL |
| | ERSMRKLIKEIKKRTS (SEQ ID NO: 437) |
| DHR24 | SEAEELARRAAKEAKELCKRSTDEELCKELKKLAELLKELAERYPDSE |
| | AAKLALKAALEAIELCKQSTDEELCEELVKLAQKLIELAKRYPDSEAA |
| | KLALKAALEAIELCKQSTDEELCEELVKLAQKLIELAKRYPDSEEAKR |
| | ALKEAKELIEQCKESTDEDECRELVKRAEELIREAKENPD (SEQ ID |
| | NO: 438) |
| DHR25 | DERDKVRELIDRVEKELKREGTSEELIEEIRKVLKKAKEAADSDDDEAI |
| | KVAKEIVRVILELVREGTSSELIEEILKVLSLAAEAAKSTDDEAIKVAK |
| | EIVRVILELVREGTSSELIEEILKVLSLAAEAAKSTDEEAIKKAKEIVRRI |
| | LELTREGTSEEEIREELKELRKKAQKAKSPE (SEQ ID NO: 439) |
| DHR26 | DECERLRQEVEKAEKELEKLAKQSTDEEVRQIAREVAKQLRRLAEEA |
| | CRSNSDECLRLASEVVKAVQELVKLAEQATDEEVIRVALEVARELIRL |
| | AQEACRSNDDECLRLASEVVKAVQELVKLAEQATDEEVIRVALEVAR |
| | ELIRLAQEACRSNDEECLREASEVVKEVQELVKEAEKSTDEEEIRELLQ |
| | RAEERIREAQERCREGD (SEQ ID NO: 440) |
| DHR27 | TRQKEQLDEVLEEIQRLAEEARKLMTDEEEAKKIQEEAERAKEMLRR |
| | AVEKVTDNEVIEKLLEVVKEIIRLAEEAMKKMTDEEEAAKIAKEALEA |
| | IKMLARAVEEVTDNEVIEKLLEVVKEIIRLAEEAMKKMTDEEEAAKIA |
| | KEALEAIKMLARAVEEVTDKERIEQLLREVKEEIRRAEEESRKETDDE |
| | EAAKRAREALRRIRERAREVEEDKS (SEQ ID NO: 441) |
| DHR28 | DEEVQRIREEVRRAIEEVRESLERNDSEEAEELAREALERVAEEVTKESI |
| | KERPDRDLAIEAIRALVRLAIEIVRLALEQNDSELAREVAEEALRAVAE |
| | VVKEAIRQRGDRDLAIEAIRALVRLAIEIVRLALEQNDSELAREVAEEA |
| | LRAVAEVVKEAIRQRGDRELAKEAIRALRRLAEEIRRLAEEQNDDELA |
| | REVEELAREAIEEVRKELERQRPGR (SEQ ID NO: 442) |
| DHR29 | SEVEESAQEVEKRAQEVREEAERRGTSQEVLDEIKRVVDEARQLAQR |
| | AKESDDSEVAESALQVVREALKVVLSALERGTSEEVLKEILRVVSEAI |
| | KLALEAIKSSDSEVAESALQVVREALKVVLSALERGTSEEVLKEILRV |
| | VSEAIKLALEAIKSSDSETARRALEKVRESLKEVLEQLERGTSEEELRE |
| | SLREVSENIRKALEEIKSPD (SEQ ID NO: 443) |
| DHR30 | STVKELLDRARELMRELAERASEQGSDEEEARKLLEDLEQLVQEIRRE |
| | LEETGTSSEVIRLIAKAIMLMAELALRAAEQGSDAEEAMKLLKDLLRL |
| | VLEILRELRETGTDSEVIRLIAKAIMLMAELALRAAEQGSDAEEAMKL |
| | LKDLLRLVLEILRELRETGTDKEEIRKVAEEIMRRAKTALDEARQGSD |
| | AEEAMKRLKEQLRRILERLREEREKGTD (SEQ ID NO: 444) |
| DHR31 | DSYTERARKAVKRYVKEEGGSEEEAEREAEKVREEIRKKASDSYLIQA |
| | AAAVVAYVIEEGGSPEEAVKIAEEVVRRIKEKADDSYLIQAAAAVVA |
| | YVIEEGGSPEEAVKIAEEVVRRIKEKADDRELIRRAAERVAEVIERGGS |
| | PEEAVKEAEKEVKKQKEESD (SEQ ID NO: 445) |
| DHR32 | SIQEKAKQSVIRKVKEEGGSEEEARERAKEVEERLKKEADDSTLVRAA |
| | AAVVLYVLEKGGSTEEAVQRAREVIERLKKEASDSTEVRAAAAVVLY |
| | VTEKGGSTEEAVQRAREVIERLKKEASDEELIREAAKEVLKVLEEGGS |
| | VEEAVERARERIEELQKRSDD (SEQ ID NO: 446) |
| DHR33 | SETEEVKKLVEEKVKKEGGSPEEAKETAKEVTEELKEESQDSTLLKVA |
| | ALVASAVLKEGGSPEEAAETAKEVVKELRKSASDSTLLKVAALVASA |
| | VLKEGGSPEEAAETAKEVVKELRKSASDEELLKEAARQAEESLRQGK |
| | SPEEAAEEAKKEVKKLKEKSQD (SEQ ID NO: 447) |
| DHR34 | SETEEVKKLCEEKVKKEGGSPEEAKETAKEVTEELKEESQDSTLLKVA |
| | ALCASAVLKEGGSCEEAAETAKEVVKELRKSASDSTLLKVAALCASA |
| | VLKEGGSCEEAAETAKEVVKELRKSASDEELLKEAARQAEESLRQGK |
| | SCEEAAEEAKKEVKKLKEKSQD (SEQ ID NO: 448) |
| DHR35 | SEEDEVAKQASRYAKEQGGDPEKSREEAEKALEEVKKQATSSEALQV |
| | ALEAARYASEEGEDPAEALKEAARALEEVRRSATSSEALQVALEAAR |
| | YASEEGEDPAEALKEAARALEEVRRSATSEEDLKEALDRAREASERG |
| | QNPAESLKEAAEELKKKKEKSSD (SEQ ID NO: 449) |
| DHR36 | SDLEKALKRFVKEEKKKGRNPEEAKKEAKKLKKKLKKSAGSSDLLTA |
| | LAKFVLEEVRKGRNPEEAVKEAIKLAEKLKRSAGSSDLLTALAKFVLE |
| | EVRKGRNPEEAVKEAIKLAEKLKRSAGSSEQLEKLATKVLEEVKKGR |
| | NPKRAVEEAIKQAKEDRKRSNS (SEQ ID NO: 450) |
| DHR37 | SSTERAAQSVKKYLQQQGKDPDQAQKKAQEVKENIEKEANSSSVLRA |
| | AAAVVFYLLEQGYDPDQALKKAQEVARNIENEANSSSVLRAAAAVVF |
| | YLLEQGYDPDQALKKAQEVARNIENEANSDDVIKEAAKVVYKRLEE |
| | GQDPDKALEEARKRAQKTEKKTTS (SEQ ID NO: 451) |
| DHR38 | SSTERAAQSCKKYLQQQGKDPDQAQKKAQEVKENIEKEANSSSVIRA |
| | AAACVFYLLEQGYDCDQALKKAQEVARNIENEANSSSVIRAAAACVF |
| | YLLEQGYDCDQALKKAQEVARNIENEANSDDVIKEAAKVVYKRLEE |
| | GQDCDKALEEARKRAQKTEKKTTS (SEQ ID NO: 452) |
| DHR39 | SDLQEVADRIVEQLKREGRSPEEARKEARRLIEEIKQSAGGDSELIEVA |
| | VRIVKELEEQGRSPSEAAKEAVELIERIRRAAGGDSELIEVAVRIVKEL |
| | EEQGRSPSEAAKEAVELIERIRRAAGGDSDRIKKAVELVRELEERGRSP |
| | SEAARRAVEEIQRSVEEDGGN (SEQ ID NO: 453) |
| DHR40 | SESDEVAKRISKEAKKEGRSEEEVKELVERFREAIEKLKEQGDSEAIRV |
| | AVELADEALREGLSPEEVVELVERFVQAIQKLQENGESEAIRVAVEIAD |
| | EALREGLSPEEVVELVERFVQAIQKLQENGEEDEIQKAVETAQEQLEE |
| | GRSPKEVVETVEEQVKEVEEKQQKGE (SEQ ID NO: 454) |
| DHR41 | SDIEKAKRIADRAIDVVRKAAEKEGGSPEKIREALQQAKRCAEKLIRL |
| | VKEAQESNSSDVREAARVALEAVRVVVRAAEEKGGSPEEVVEAVCR |
| | AVRCAEKLIRLVKRAEESNSSDVREAARVALEAVRVVVRAAEEKGGS |
| | PEEVVEAVCRAVRCAEKLIRLVKRAEESNSENVRESARRALEKVLKT |
| | VQQAEEEGKSPEEVVEQVCRSVRKAEEQIRETQERERSTS (SEQ ID |
| | NO: 455) |
| DHR42 | SDAEEVKKQAEEIANRAYKTAQKQGESDSRAKKAEKLVRKAAEKLA |
| | RLIERAQKEGDSDALEVARQALEIARRAFETAKKQGHSATEAAKAFV |
| | DVVEAAISLAELIISAKRQGDSDALEVARQALEIARRAFETAKKQGHS |
| | ATEAAKAFVDVVEAAISLAELIISAKRQGDQKALEIARKALQKAKENF |
| | EEAQKRGESATQAAKRFVDTVEKEIKKAQEQIKRERKGD (SEQ ID |
| | NO: 456) |
| DHR43 | SKEEELIEKARRVAKEAIEEAKRQGKDPSEAKKAAEKLIKAVEEAVKE |
| | AKRLKEEGNSELAELISEAIQVAVEAVEEAVRQGKDPFKAAEAAAELI |
| | RAVVEAVKEAERLKREGNSELAELISEAIQVAVEAVEEAVRQGKDPF |
| | KAAEAAAELIRAVVEAVKEAERLKREGNSELAKKINDTIREAVREVQ |
| | QAVEDGKDPFEAAREAAEKIRESVERVREEEEKKRRGN (SEQ ID NO: |
| | 457) |
| DHR44 | SNEQEKKDLKKAEEAAKSPDPELIREAIERAEESGSNKAKEIILRAAEE |
| | AAKSPDPELIRLAIEAAERSGSNKAKEIILRAAEEAAKSPDPELIRLAIE |
| | AAERSGSEKAKEIIKRAAEEAQKSPDPELQKLAKEARERLG (SEQ ID |
| | NO: 458) |
| DHR45 | SSEEEELEKDAREASESGADPEWLREIVDLARESGDSEVIELAKRAEEA |
| | AKSGADPEWLLRIVRQAEESGSSEVIELAKRALEAAKSGADPEWLLRI |
| | VRQAEESGSEEVIELAKRALEEAKKGKDPKELLEEVRKREESG (SEQ |
| | ID NO: 459) |
| DHR46 | STKEEKERIERIEKEVRSPDPENIREAVRKAEELLRENPSTEAEELLRRA |
| | IEAAVRAPDPEAIREAVRAAEELLRENPSTEAEELLRRAIEAAVRAPDP |
| | EAIREAVRAAEELLRENPSEEAKELLRRAIESAKKAPDPEAQREAKRA |
| | EEELRKEDP (SEQ ID NO: 460) |
| DHR47 | STKEEKERIERIEKEVRSPDCENIREAVRKAEELLRENPSTEAEELLRRA |
| | IEAAVRCPDCEAIREAVRAAEELLRENPSTEAEELLRRAIEAAVRCPDC |
| | EAIREAVRAAEELLRENPSEEAKELLRRAIESAKKCPDPEAQREAKRA |
| | EEELRKEDP (SEQ ID NO: 461) |
| DHR48 | NSREEEEAKRIVKEAKKSGFDPEEVEKALREVIRVAEETGNSEALKEA |
| | LKIVEEAAKSGYDPAEVAKALAEVIRVAEETGNSEALKEALKIVEEAA |
| | KSGYDPAEVAKALAEVIRVAEETGNPEELKEALKRVLEAAKRGEDPA |
| | QVAKELAEEIRRNQEEG (SEQ ID NO: 462) |
| DHR49 | DSEEEQERIRRILKEARKSGTEESLRQAIEDVAQLAKKSQDSEVLEEAI |
| | RVILRIAKESGSEEALRQAIRAVAEIAKEAQDSEVLEEAIRVILRIAKES |
| | GSEEALRQAIRAVAEIAKEAQDPRVLEEAIRVIRQIAEESGSEEARRQA |
| | ERAEEEIRRRAQ (SEQ ID NO: 463) |
| DHR50 | DPEEVRREVERATEEYRKNPGSDEAREQLKEAVERAEEAARSPDPEA |
| | VQVAVEAATQIYENTPGSEEAKKALEIAVRAAENAARLPDPEAVQVA |
| | VEAATQIYENTPGSEEAKKALEIAVRAAENAARLPDPEAVRVAEEAA |
| | DQIRKNTPGSELAKRADEIKKRARELLERLP (SEQ ID NO: 464) |
| DHR51 | QSEDRKEKIRELERKARENTGSDEARQAVKEIARIAKEALEEGNADTA |
| | KEAIQRLEDLARDYSGSDVASLAVKAIAKIAETALRNGYADTAKEAIQ |
| | RLEDLARDYSGSDVASLAVKAIAKIAETALRNGYKETAEEAIKRLREL |
| | AEDYKGSEVAKLAEEAIERIEKVSRERG (SEQ ID NO: 465) |
| DHR52 | QCEDRKEKIRELERKARENTGSDEARQAVKEIARIAKEALEEGCCDTA |
| | KEAIQRLEDLARDYSGSDVASLAVKAIAKIAETALRNGCCDTAKEAIQ |
| | RLEDLARDYSGSDVASLAVKAIAKIAETALRNGCKETAEEAIKRLREL |
| | AEDYKGSEVAKLAEEAIERIEKVSRERG (SEQ ID NO: 466) |
| DHR53 | SNDEKEKLKELLKRAEELAKSPDPEDLKEAVRLAEEVVRERPGSNLA |
| | KKALEIILRAAEELAKLPDPEALKEAVKAAEKVVREQPGSNLAKKALE |
| | IILRAAEELAKLPDPEALXEAVKAAEKVVREQPGSELAKKALEIIERAA |
| | EELKKSPDPEAQKEAKKAEQKVREERPG (SEQ ID NO: 467) |
| DHR54 | TTEDERRELEKVARKAIEAAREGNTDEVREQLQRALEIARESGTTEAV |
| | KLALEVVARVAIEAARRGNTDAVREALEVALEIARESGTTEAVKLAL |
| | EVVARVAIEAARRGNTDAVREALEVALEIARESGTEEAVRLALEVVK |
| | RVSDEAKKQGNEDAVKEAEEVRKKIEEESG (SEQ ID NO: 468) |
| DHR55 | SSVAEETEKRCKKISKELKKEGKNPEWIEELQRAADKLVEVARRATSS |
| | DALEIAKRAVKIAEELAKQGSNPKWIAELLKAAAKLVEVAARATSSD |
| | ALELAKRAVKIAEELAKQGSNPKWIAELLKAAAKLVEVAARATSPKA |
| | LKQAKEAVKEAEELAKKGRNPKEIAEELKKRAKEVEKLARST (SEQ |
| | ID NO 469) |
| DHR56 | SSVAEEIEKRCKKISKELKKEGKNPEWIEELQRACDKLVEVARRATSS |
| | DALEIAKRCVKIAEELAKQGSNPKWIAELLKACAKLVEVAARATSSD |
| | ALEIAKRCVKIAEELAKQGSNPKWIAELLKACAKLVEVAARATSPKA |
| | LKQAKECVKEAEELAKKGRNPKEIAEELKKCAKEVEKLARST (SEQ |
| | ID NO: 470) |
| DHR57 | STEELKKVLERVRELSERAKESTDPEEALKIAKEVIELALKAVKEDPST |
| | DALRAVLEAVRLASEVAKRVTDPDKALKIAKLVIELALEAVKEDPST |
| | DALRAVLEAVRLASEVAKRVTDPDKALKIAKLVTELALEAVKEDPSEE |
| | AKRAVEEAKRLAEEVSKRVTDPELSEKIRQLVKELEEEAQKEDP (SEQ |
| | ID NO: 471) |
| DHR58 | STEELKKVLERVRELCERAKESTDPEEALKIAKEVIELALKAVKEDPST |
| | DALRAVLEAVRCACEVAKRVTDPDKALKIAKLVIELALEAVKEDPST |
| | DALRAVLEAVRCACEVAKRVTDPDKALKIAKLVIELALEAVKEDPSE |
| | EAKRAVEEAKRCAEEVSKRVTDPELSEKIRQLVKELEEEAQKEDP |
| | (SEQ ID NO: 472) |
| DHR59 | KTEVEKKAKEVIKEAKELAKELDSEEAKKVVERIKEAAEAAKRAAEQ |
| | GKTEVAKLALKVLEEALELAKENRSEEALKVVLHIARAALAAAQAAE |
| | EUKTEVAKLALKVLEEAIELAKENRSEEALKVVLEIARAALAAAQAA |
| | EEGKSDEARDALRRLEEAIEEAKENRSKESLEKVREEAKEAEQQAED |
| | AREG (SEQ ID NO: 473) |
| DHR60 | TDIKKKAEEIIKEAKKQGSEDAIRLAQEAKKQGTDILVRAAEIVVRAQ |
| | EQGSEDAIRLAKEASREGTDILVRAAEIVVRAQEQGSEDAIRLAKEAS |
| | REGTPTLVKAAEKVVRAQQKGSQDTIEKAKEESREG (SEQ ID NO: |
| | 474) |
| DHR61 | TDIKKKAEEIIKEAKKQGSEDAIRLAQECKKQGTDICVRAAEIVVRAQ |
| | EQGSEDAIRLAKECSREGTDICVRAAEIVVRAQEQGSEDAIRLAKECSR |
| | EGTPTCVKAAEKVVRAQQKGSQDTIEKAKEESREG (SEQ ID NO: 475) |
| DHR62 | DNDEKRKRAEKALQRAQEAEKKGDVEEAVRAAQEAVRAAKESGDN |
| | DVLRKVAEQALRIAKEAEKQGNVEVAVKAARVAVEAAKQAGDNDV |
| | LRKVAEQALRIAKEAEKQGNVEVAVKAARVAVEAAKQAGDQDVLR |
| | KVSEQAERISKEAKKQGNSEVSEEARKVADEAKKQTG (SEQ ID NO: |
| | 476) |
| DHR63 | DPDEDRERLKEELKKIREALREAKEKPDPEEIKRALREVLEAIRRILKL |
| | AERAGDPDLAREALKEINKVIREALEIAKRVPDPEVIKEALRVVLEAIR |
| | AILKLAEQAGDPDLAREALKEINKVIREALEIAKRVPDPEVIKEALRVV |
| | LEAIRAILKLAEQAGDPDLAREALEEIDKVIDEAQEISERVPDEEVQRE |
| | AQEVIKEADRARKKLSEQSG (SEQ ID NO: 477) |
| DHR64 | DPEDELKRVEKLVKEAEELLRQAKEKGSEEDLEKALRTAEEAAREAK |
| | KVLEQAEKEGDPEVALRAVELVVRVAELLLRIAKESGSEEALERALR |
| | VAEEAARLAKRVLELAEKQGDPEVALRAVELVVRVAELLLRIAKESG |
| | SEEALERALRVAEEAARLAKRVLELAEKQGDPEVARRAVELVKRVAE |
| | LLERIARESGSEEAKERAERVREEARELQERVKELREREG (SEQ ID |
| | NO: 478) |
| DHR65 | DPEDELKRVEKLVKEAEELLRQCKEXGSEECLEKALRTAEEAAREAK |
| | KVLEQAEKEGDPEVALRAVELVVRVAELLLRICKESGSEECLERALRV |
| | AEEAARLAKRVLELAEKQGDPEVALRAVELVVRVAELLLRICKESGS |
| | EECLERALRVAEEAARLAKRVLELAEKQGDPEVARRAVELVKRVAEL |
| | LERICRESGSEECKERAERVREEARELQERVKELREREG (SEQ ID NO: |
| | 479) |
| DHR66 | TSDDDKVREAEERVREAIERIQRALKKRDTPDARKALEAAKKLLKVV |
| | EKAKKRGTSDAIKVAEAAARVAEAIARILEALNERDTPDARKALRAAI |
| | KLAEVVYKAAESGTSDAIKVAEAAARVAEAIARILEALNERDTPDAR |
| | KALRAAIKLAEVVYKAAESGTTEALKVAEKAARVAEKIARILEKLNE |
| | RDTPEARKKLRQAIKEAEKVYKESEQG (SEQ ID NO: 480) |
| DHR67 | TSEIDKLIKKLRQTAKEVKREAEERKRRSTDPTVREVTERLAQLALDV |
| | AEEAARLTKKATISEVAKLVWKLARTAIEVIREAIERAERSTDPEVIRV |
| | ILELARLAAEVAKEAARLIVKATTSEVAKLVWKLARTAIEVIREAIERA |
| | ERSTDPEVIRVILELARLAAEVAKEAARLIVKATTEEVAKKVWKEAYR |
| | AIEEIRKAIEKAERSTDPNEIKKILEEARKKAEEAIERAKEIVKST (SEQ |
| | ID NO: 481) |
| DHR68 | TPRERLEEAKERVEEIRELIDKARKLQEQGNKEEAEKVLREAREQIRE |
| | VTRELEEIAKNSDTPELALRAAELLVRLIKLLIEIAKLLQEQGNKEEAE |
| | KVLREATELIKRVTELLEKIAKNSDTPELALRAAELLVRLIKLLIEIAKL |
| | LQEQGNKEEAEKVLREATELIKRVTELLEKIAKNSDTPELAKRAAELL |
| | KRLIELLKEIAKLLEEEGNEDEAEKVKEEAKELEERVRELEERIRKNSD |
| | (SEQ ID NO: 482) |
| DHR69 | NPQEDLERAEKVVRSVEEVLQRAKEAQREGDKEKVERLIKEAENQIR |
| | KARELLERVVRQNPDDPEVLLRVAELIVRLVEVVLELAKLAEKNGDK |
| | EQVERLIQTAEELIREARELLERVSREIPDNPEVLLRVAELIVRLVEVVL |
| | ELAKLAEKNGDKEQVERLIQTAEELIREARELLERVSREIPDNPESLKR |
| | VAELIKRLVKVVDELSKLAERNGDRDQVERLRQLAEELRREAEELEE |
| | RVRRERPD (SEQ ID NO: 483) |
| DHR70 | STEEKIEEARQSIKEAERSLREGNPEKAREDVRRALELVRELEKLARKT |
| | GSTEVLIEAARLAIEVARVALKVGSPETAREAVRTALELVQELERQAR |
| | KTGSTEVLIEAARLAIEVARVALKVGSPETAREAVRTALELVQELERQ |
| | ARKTGSDEVLKRAAELAKEVARVAKEVGSPETARQARETAERLREEL |
| | RRNREKKG (SEQ ID NO: 484) |
| DHR71 | DPEEILERAKESLERAREASERGDEEEFRKAAEKALELAKRLVEQAKK |
| | EGDPELVLEAAKVALRVAELAAKNGDKEVFKKAAESALEVAKRLVE |
| | VASKEGDPELVLEAAVALRVAELAAKNGDKEVFKKAAESALEVAK |
| | RLVEVASKEGDPELVEEAAKVAEEVRKLAKKQGDEEVYEKARETAR |
| | EVKEELKRVREEG (SEQ ID NO: 485) |
| DHR72 | DSTKEKARQLAEEAKETAEKVGDPELIKLAEQASQEGDSEKAKAILLA |
| | AEAARVAKEVGDPELIKLALEAARRGDSEKAKAILLAAEAARVAKEV |
| | GDPELIKLALEAARRGDSEKARAILEAAERAREAKERGDPEQIKKARE |
| | LAKRG (SEQ ID NO: 486) |
| DHR73 | DAEEEAKEAIKRAQEAIELARKGNPEEARKVAEEARERAERVREEAE |
| | KRGDAEVLALVAIALALVAIALAEVGNPEEAREVAERAKEIAERVREL |
| | AEKRGDAEVLALVAIALALVAIALAEVGNPEEAREVAERAKEIAERV |
| | RELAEKRGDARVLKLVAKALELVAEALKKVGNPEEAREVEERAREIK |
| | ERVRRLLEEKG (SEQ ID NO: 487) |
| DHR74 | DSEADRIIKKLQKEIKEVEQEARDSNDDEERELLKRLAEALKRAAEAV |
| | KRAQESGDSEAIRIIKKLVKEITEVVREARKSTDKEEIELLIRLAEALAR |
| | AAEAVADAAKSGDSEAIRIIKKLVKEITEVVREARKSTDKEEIELLIRL |
| | AEALARAAEAVADAAKSGDQEAIRIKKLVKKIIEVVRKARKSTNKK |
| | KIEKLIRKAEKLARKAEQIAEDAKRG (SEQ ID NO: 488) |
| DHR75 | DSEKEKATELAERAQDVASRVEEEARREGSRELIEIARELRERAEEAS |
| | QEGDSEKAKAILLAAKAVLVAVEVYERAKRQGSDELREIARELAKEA |
| | LRAAQEGDSEKAKAILLAAKAVLVAVEVYERAKRQGSDELREIAREL |
| | AKEALRAAQEGDSEKARAILEAAREVLRAVEQYERAKRRGDDDERE |
| | RAREEAREALERAREG (SEQ ID NO: 489) |
| DHR76 | NPELEEWIRRAKEVAKEVEKVAQRAEEEGNPDLRDSAKELRRAVEEA |
| | IEEAKKQGNPELVEWVARAAKVAAEVIKVAIQAEKEGNRDLFRAALE |
| | LVRAVIEAIEEAVKQGNPELVEWVARAAKVAAEVIKVAIQAEKEGNR |
| | DLFRAALELVRAVIEAIEEAVKQGNPELVERVARLAKKAAELIKRAIR |
| | AEKEGNRDERREALERVREVIERIEELVRQG (SEQ ID NO: 490) |
| DHR77 | NSDEEEAREWAERAEEAAKEALEQAKREGDEDARRVAEELEKQAEE |
| | ARRKKDSEEAEAVYWAARAVLAALEALEQAKREGDEDARRVAEELL |
| | RQAEEAARKKNSEEAEAVYWAARAVLAALEALEQAKREGDEDARR |
| | VAEELLRQAEEAARKKNPEEARAVYEAARDVLEALQRLEEAKRRGD |
| | EEERREAEERLRQAEERARKK (SEQ ID NO: 491) |
| DHR78 | NSDEEEAREWAERAEEAAKEALEQAKREGDEDARRCAEELEKQAEE |
| | ARRKKDSEEAEAVYWAARAVLAALEALEQAKREGDEDARRCAEELL |
| | RQACEAARKKNSEEAEAVYWAARAVLAALEALEQAKREGDEDARR |
| | CAEELLRQACEAARKKNPEEARAVYEAARDVLEALQRLEEAKRRGD |
| | EEERREAEERLRQACERARKK (SEQ ID NO: 492) |
| DHR79 | SSDEEEARELIERAKEAAERAQEAAERTGDPRVRELARELKRLAQEAA |
| | EEVKRDPSSSDVNEALKLIVEAIEAAVRALEAAERTGDPEVRELAREL |
| | VRLAVEAAEEVQRNPSSSDVNEALKLIVEAIEAAVRALEAAERTGDPE |
| | VRELARELVRLAVEAAEEVQRNPSSEEVNEALKKIVKAIQEAVESLRE |
| | AEESGDPEKREKARERVREAVERAEEVQRDPS (SEQ ID NO: 493) |
| DHR80 | NSEELERESEEAERRLQEARKRSEEARERGDLKELAEALIEEARAVQE |
| | LARVASERGNSEEAERASEKAQRVLEEARKVSEEAREQGDDEVLALA |
| | LIAIALAVLALAEVASSRGNSEEAERASEKAQRVLEEARKVSEEAREQ |
| | GDDEVLALALIAIALAVLALAEVASSRGNKEEAERAYEDARRVEEEA |
| | RKVKESAEEQGDSEVKRLAEEAEQLAREARRHVQETRG (SEQ ID NO: |
| | 494) |
| DHR81 | NSEELERESEEAERRLQEARKRSEEARERGDLKELAEALIEEARAVQE |
| | LARVACERGNSEEAERASEKAQRVLEEARKVSEEAREQGDDEVLALA |
| | LIAIALAVLALAEVACCRGNSEEAERASEKAQRVLEEARKVSEEAREQ |
| | GDDEVLALALIAIALAVLALAEVACCRGNKEEAERAYEDARRVEEEA |
| | RKVKESAEEQGDSEVRLAEEAEQLAREARRHVQECRG (SEQ ID NO: |
| | 495) |
| DHR82 | NDEEVQEAVERAEELREEAEELIKKARKTGDPELLRKALEALEEAVR |
| | AVEEAIKRNPDNDEAVETAVRLARELKKVAEELQERAKKTGDPELLK |
| | LALRALEVAVRAVELAIKSPDNDEAVETAVRLARELKVAEELQER |
| | AKKTGDPELLLALRALEVAVRAVELAISNPDNEEAVETAKRLAEE |
| | LRKVAELLEERAKETGDPELQELAKRAKEVADRARELAKKSNPN |
| | (SEQ ID NO: 496) |
| DHR83 | NDEEVQEACERAEELREEAEELIKKARKTGDPELLRKALELEEAVRA |
| | VEEAIKRNPDNDECVETACRLARELKKVAEELQERAKKTGDPELLKL |
| | ALRALEVAVRAVELAIKSNPDNDECVETACRLARELKKVAEELQERA |
| | KKTGDPELLKLALRALEVAVRAVELAIKSNPDNEECVETAKRLAEEL |
| | RKVAELLEERAKETGDPELQELAKRAKEVADRARELAKKSNPN (SEQ |
| | ID NO: 497) |

[0314] As used throughout the present application, the term “polypeptide” is used in its broadest sense to refer to a sequence of subunit amino acids. The polypeptides of the invention may comprise L-amino acids, D-amino acids (which are resistant to L-amino acid-specific proteases in vivo), or a combination of D- and L-amino acids. The polypeptides described herein may be chemically synthesized or recombibantly expressed. The polypeptides may be linked to other compounds to promote an increased half-life in vivo, such as by PEGylation, HESylation, PASylation, glycosylation, or may be produced as an Fc-fusion or in deimmunized variants. Such linkage can be covalent or non-covalent as is understood by those of skill in the art.

[0315] As will be understood by those of skill in the art, the polypeptides of the invention may include additional residues at the N-terminus, C-terminus, or both that are not present in the polypeptides of Tables 1-2; these additional residues are not included in determining the percent identity of the polypeptides of the invention relative to the reference polypeptide.

[0316] In one Embodiment, the polypeptide comprises at least one conservative amino acid substitution. As used herein, “conservative amino acid substitution” means amino acid or nucleic acid, substitutions that do not alter or substantially alter polypeptide or polynucleotide function or other characteristics. A given amino acid can be replaced by a residue having similar physiochemical characteristics, e.g., substituting one aliphatic residue for another (such as He, Val, Leu, or Ala for one another), or substitution of one polar residue for another (such as between Lys and Arg; Gin and Asp; or Gln and Asn). Other such conservative substitutions, e.g., substitutions of entire regions having similar hydrophobicity characteristics, are well known. Polypeptides comprising conservative amino acid substitutions can be tested in any on of the assays described herein to confirm that a desired activity; e.g. antigen-binding activity and specificity of a native or reference polypeptide is retained.

[0317] Amino acids can be grouped according to similarities in the properties of their side chains (in A. L. Lehninger, in Biochemistry, second ed., pp. 73-75, Worth Publishers, New York (1975)): (1) non-polar: Ala (A), Val (V), Leu (L), Ile (I), Pro (P), Phe (P), Trp (W), Met (M); (2) uncharged polar: Gly (G), Ser (S), Thr (T), Cys (C), Tyr (Y), Asn (N), Gln (Q); (3) acidic: Asp (D), Glu (E); (4) basic: Lys (K), Arg (R), His (H). Alternatively, naturally occurring residues can be divided into groups based, on common side-chain properties: (1) hydrophobic: Norleucine, Met, Ala, Val, Leu, Ile; (2) neutral hydrophilic: Cys, Ser, Thr, Asn, Gln; (3) acidic: Asp, Glu; (4) basic: His, Lys, Arg; (5) residues that influence chain orientation: Gly, Pro; (6) aromatic: Trp, Tyr, Phe. Non-conservative substitutions will entail exchanging a member of one of these classes for another class. Particular conservative substitutions include, for example; Ala into Gly or into Ser; Arg into Lys; Asn into Gin or into H is; Asp into Glu; Cys into Ser; Gln into Asn; Glu into Asp; Gly into Ala or into Pro; His into Asn or into Gln; He into Leu or into Val; Leu into Ile or into Val; Lys into Arg, into Gln or into Glu; Met into Leu, into Tyr or into Ile; Phe into Met, into Leu or into Tyr; Ser into Thr; Thr into Ser; Trp into Tyr; Tyr into Trp; and/or Phe into Val, into Ile or into Leu. As noted above, the polypeptides of the invention may include additional residues at the N-terminus, C-terminus, or both. Such residues may be any residues suitable for an intended use, including but not limited to detection tags (i.e.: fluorescent proteins, antibody epitope tags, etc.), linkers, ligands suitable for purposes of purification (His tags, etc.), and peptide domains that add functionality to the polypeptides.

[0318] In another embodiment, the invention provides protein assemblies, comprising a plurality of polypeptides of the present invention having the same amino acid sequence. As disclosed herein, the polypeptides of the invention represent novel repeat proteins with precisely specified geometries, and thus self-assemble into the protein assemblies of the invention.

[0319] In a further aspect, the present invention provides isolated nucleic acids encoding a polypeptide of the present invention. The isolated nucleic acid sequence may comprise RN A or DNA. As used herein, “isolated nucleic acids” are those that have been removed from their normal surrounding nucleic acid sequences in the genome or in cDNA sequences. Such isolated nucleic acid sequences may comprise additional sequences useful for promoting expression and/or purification of the encoded protein, including but not limited to polyA sequences, modified Kozak sequences, and sequences encoding epitope tags, export signals, and secretory signals, nuclear localization signals, and plasma membrane localization signals. It will be apparent to those of skill in the art, based on the teachings herein, what nucleic acid sequences will encode the polypeptides of the invention.

[0320] In another aspect, the present invention provides recombinant expression vectors comprising the isolated nucleic acid of any aspect of the invention operatively linked to a suitable, control sequence. “Recombinant expression vector” includes vectors that operatively link a nucleic acid coding region or gene to any control sequences capable of effecting expression of the gene product. “Control sequences” operably linked to the nucleic acid sequences of the invention ate nucleic acid sequences capable of effecting the expression of the nucleic acid molecules. The control sequences need not be contiguous with the nucleic acid sequences, so long as they function to direct the expression thereof. Thus, for example, intervening untranslated yet transcribed sequences can be present between a promoter sequence and the nucleic acid sequences and the promoter sequence can still be considered “operably linked” to the coding sequence. Other such control sequences include, but are not limited to, polyadenylation signals, termination signals, and ribosome binding sites. Such expression vectors can be of any type known in the art, including but not limited plasmid and viral-based expression vectors. The control sequence used to drive expression of the disclosed nucleic acid sequences in a mammalian system may be constitutive (driven by any of a variety of promoters, including but not limited to, CMV, SV40, RSV, actin, EF) or inducible (driven by any of a number of inducible promoters including, but not limited to, tetracycline, ecdysone, steroid-responsive). The construction of expression vectors for use in transfecting host cells is well known in the art, and thus can be accomplished via standard techniques. (See, for example, Sambrook, Fritsch, and Maniatis, in: Molecular Cloning, A Laboratory Manual, Cold Spring Harbor Laboratory Press, 1989; Gene Transfer and Expression Protocols, pp. 109-128, ed. E. J. Murray, The Humana Press Inc., Clifton, N.J.), and the Ambion 1998 Catalog (Ambion, Austin, Tex.). The expression vector must be replicable in the host organisms either as an episome or by integration into host chromosomal DNA. In various embodiments, the expression vector may comprise a plasmid, viral-based vector, or any other suitable expression vector.

[0321] In a further aspect, the present invention provides host ceils that comprise the recombinant expression vectors disclosed herein, wherein the host, cells can be either prokaryotic or eukaryotic. The cells can be transiently or stably engineered to incorporate the expression vector of the invention, using standard techniques in the art, including but not limited to standard bacterial transformations, calcium phosphate co-precipitation, electroporation, or liposome mediated-, DEAE dextran mediated-, polycationic mediated-, or vital mediated transfection. (See, for example, Molecular Cloning: A Laboratory Manual (Sambrook, et al., 1989, Cold Spring Harbor laboratory Press; Culture of Animal Cells: A Manual of Basic Technique, 2^{nd} Ed. (R. I. Freshney, 1987. Liss, Inc. New York N.Y.). A method of producing a polypeptide according to the invention is an additional part of the invention. The method comprises the steps of (a) culturing a host according to this aspect of the invention under conditions conducive to the expression of the polypeptide, and (b) optionally, recovering the expressed polypeptide. The expressed polypeptide can be recovered from the cell free extract, but preferably they are recovered from the culture medium. Methods to recover polypeptide from cell free extracts or culture medium are well known to the person skilled in the art.

[0322] The particulars shown herein are by way of example and for purposes of illustrative discussion of the preferred embodiments of the present invention only and are presented in the cause of providing what is believed to be the most useful and readily understood description of the principles and conceptual aspects of various embodiments of the invention. In this regard, no attempt is made to show structural details of the invention in more detail than is necessary for the fundamental understanding of the invention, the description taken with the drawings and/or examples making apparent to those skilled in the art how the several forms of the invention may be embodied in practice.

### EXAMPLES

[0323] In repeat proteins, the interactions between adjacent units define the shape and curvature of the overall structure⁶. While in nature the sequences of these units generally differ, highly stable repeat proteins with identical units^{7,8} have been designed for several families [symbol] and, for leucine rich repeats, customized designed units allow control of curvature²² and new architectures¹⁷. All designed repeat structures to date have been based on naturally occurring repeat protein families. These families may cover all stable repeat protein structures that can be built from the 20 amino acids or, alternatively, natural evolution may only have sampled a subset Of what is possible.

[0324] To explore the range of possible repeat protein structures, we generated new repeat protein, backbone arrangements and designed, sequences predicted to fold into these structures (FIG. 1). Our designs are entirely de novo; they are not based on naturally occurring repeat proteins. We focused on helix-loop-helix-loop as the basic repeating unit, as this is the simplest unit from which a wide diversity of curvatures can be generated (the simpler single helix-loop unit generates only straight rod-like models). The lengths of the two helices were varied between 10 and 28 residues, and the lengths of the two turns, from 1 to 4 residues. Starting conformations for four tandem repeats of each of the 5776 (19×19×4×4) combinations of helix and loop lengths were generated by setting the backbone torsion angles to ideal helix values for helices and extended chain values for loops. Rosetta Monte Carlo fragment assembly [symbol] was carried out to generate compact structures; each Monte Carlo move was made at the equivalent position in each repeat to preserve symmetry²⁰. Rosetta design calculations²⁴ were then used to identify low energy amino acid sequences with good core packing²⁵. At each step in the Monte Carlo—simulated annealing design process, a position is picked at random, and the current residue is replaced by a randomly selected amino acid and side chain conformation, (rotamer); a detailed all-atom energy function is then evaluated. Identical substitutions were carried out in each copy at each move to maintain sequence identity between the four repeats; exposed hydrophobic residues in the N and C-terminal repeats were switched to polar residues in a second round of sequence design, generating specialized capping repeats. All steps in the design process were completely automated, and the calculations Were carried out without manual intervention. Designs with low energies and complementary core side, chain packing were-identified,; and for the amino acid sequence of each of these designs, multiple independent Rosetta de nova folding trajectories²⁶ were carried out starting from an extended chain. The structures and energies of the sampled conformations map out an energy landscape for each protein (FIG. 5).

[0325] Designed helical repeat proteins (DHRs), for which the design model had much lower energy than any other conformations sampled in the de novo folding trajectories, were selected and found to span a wide array of architectures. As the rigid body transform relating adjacent repeat units is identical throughout each design by construction, and since the repeated application to an object of an identical rigid body transformation produces a helical array, the designs all have an overall helical structure⁶. It is thus convenient to classify these architectures based on three parameters defining a helix [symbol] : the radius (r), the twist between adjacent repeats around the helical axis (ω) and the translation between adjacent repeats along the helical axis (z). Because the repeat units are connected and form well packed structures, the three parameters are coupled. The arc length in the x-y plane spanned by a repeat unit is ˜rω and the total length of a unit is ˜sqrt((rω)*+z²), hence the radius(r)−twist(ω)distribution has a hyperbolic shape with highly twisted structures having a smaller radius. Models with high r and high ω do not form a continuous protein core and are discarded during the backbone generation. Similarly, low energy structures do not have high (>16 Å) z values as helices in adjacent repeats cannot then closely pack. Despite these geometric constraints, the wide range of helical parameters observed in the design models highlights the high level of complexity that can be generated even for a pair of helices. In contrast, native helical repeat proteins span a much narrower range of helical parameters with very few straight (high r, low ω) or highly twisted (low r, high ω) geometries.

[0326] We selected for experimental characterization 83 designs spanning the range of α-helix and loop lengths and overall helical architectures; 26 of these contain disulphide bonds. For each of the designs, we obtained a synthetic gene encoding an N-terminal capping repeat, two internal repeats, and a C-terminal capping repeat including a 6-histidine tag. The proteins were expressed in Escherichia coli and purified by affinity chromatography. 74 of the 83 designs were expressed solubly and had the expected alpha helical CD spectrum at 25° C., and 72 were stably folded at 95° C. 55 of these (66% of the original experimental set) were predominantly monomeric by analytical size exclusion chromatography coupled to multi-angle light scattering (SEC-MALS); DHR49 and DHR76 were dimeric in solution. This group had the same fraction of proteins with disulphide bonds as the initial set (FIG. 2a), indicating that disulphide bonds did not provide any particular advantage in expression, solubility, or folding efficiency by further stabilizing the fold. Representative data on six of the designs are shown in FIG. 2b.

[0327] We solved the crystal structures of 15 of the designs (FIG. 3) with resolutions between 1.20 Å and 3.35 <. The design models closely match the crystal structures with Cα RMSDs from 0.7 Å to 2.5 Å and recapitulate the side chain orientations within the hydrophobic core (FIGS. 3 and 6). The designed disulfide bonds are all formed in the structures of DHR4 and DHR7 but not in the structures of DHR5 and DHR18 due to slight structural shifts relative to the design models. The accuracy of the design models was sufficiently high that all of the crystal structures but DHR5 could be solved by molecular replacement. These repeat proteins are among the largest crystallographically validated protein structures designed completely de novo, ranging in size from 171 residues for DHR49 to 238 residues for DHR64. The crystal structures illustrate both the wide range of twist and curvature sampled by our repeat protein generation process and the accuracy with which these can be designed.

[0328] To characterize the structures for proteins that were reticent to crystallization and analyze all 55 proteins in solution, we used small angle X-ray scattering (SAXS) [symbol] . We collected SAXS profiles for each design, and compared them to scattering profiles calculated from the design models and from crystal structures. For 43 of the designs, the radius of gyration, molecular weight, and distance distributions computed from the SAXS data corresponded to those computed from the models. For DHR49 and DHR76, we used the dimer orientation in the crystal for the fitting; the crystallographically confirmed DHR5 was unsuitable for SAXS as it formed higher order species. To further assess the fit between models and experimental data, we employed the volatility ratio (Vr); which is more robust to experimental noise than the traditional comparison used in SAXS [symbol] . We used the Vr values of the design models confirmed by crystallography for calibration; designs for which the Vr value between model and experimental data was less than 2.5 were considered successful. All 43 designs with radii, molecular weights, and distances consistent with the SAXS data are below the Vr threshold. Furthermore, for almost: all of the designs, the theoretical scattering profile computed from the design model more closely matches its own experimental scattering profile than the experimental scattering profiles of structurally dissimilar designs.

[0329] The crystallographic and SAXS data together structurally validate 44 of the 55 designs that were folded and monodisperse—more than half of the 83 that were experimentally characterized. We randomly selected two designs confirmed by crystallography, two confirmed by SAXS, and two not confirmed by SAXS, and examined their guanidine hydrochloride (GuHCl) unfolding profiles. In contrast to almost all native proteins, four of the six designs do not denature at GuHCl concentrations up to 7.5 M; the other two, which were confirmed by SAXS but did. not yield crystals, have denaturation midpoints above 3 M (FIG. 7). Hence, even the apparent failures are well folded proteins; small amounts of association may be responsible for the discrepancies between computed and observed SAXS spectra rather than deviations from the design models.

[0330] We show here that a wide range of novel repeat proteins can be generated by tandem repeating a simple helix-loop-helix-loop building block. As illustrated by the comparison of 15 design models to the corresponding crystal Structures (FIG. 3), our approach allows precise control over structural details throughout a broad range of geometries and curvatures. The design models and sequences are remarkably different from each other and from naturally occurring repeat proteins, without any significant sequence or structural homology to known proteins. This work achieves key milestones in computational protein design; the design protocol is completely automatic, the folds are unlike those in nature, more than half of the experimentally tested designs have the correct overall structure as assessed by SAXS, and the crystal structures demonstrate precise control over backbone conformation for proteins over 200 amino acids. The observed level of control over the repeating helix-loop-helix-loop architecture shows that computational protein design has matured to the point of providing alternatives to naturally occurring scaffolds, including graded and tunable variation difficult to achieve starting from existing proteins. We anticipate that the 44 successful designs described in this work, and sets generated using similar protocols for other repeat units, will be widely useful starting points for the design of new protein functions and assemblies.

[0331] Naturally occurring repeat protein families, such as ankyrins, leucine rich repeats, TAL effectors and many others, play central roles in biological systems and in current molecular engineering efforts. Our results suggest that these families are only the tip of the iceberg of what ss possible for polypeptide chains; there are clearly large regions of repeat protein space that are not sampled by-currently known repeat protein structures. Repeat protein structures similar to our designs may not have been characterized yet, or perhaps may simply not exist in nature.

### Methods

### Similarity Search.

[0332] BLAST^{30,31} and HHSEARCH [symbol] sequence similarity searches were performed with default settings. HHSEARCH was run on Pfam [symbol] . Sequence alignments were depicted using Jalview [symbol] . The structural similarity between designs and known helical repeat proteins was assessed by TM-align³⁵ on RepeatsDB [symbol] representative structures.

### Protein Expression and Characterization.

[0333] Genes were synthesized and cloned in vector pET21 by GenScript (Piscataway, N.J.). Proteins were expressed in E. coli BL21(DE3), induced with 250 uM isopropyl-β-D-thiogalactopyransoide (IPTG) overnight at 22° C. and purified by metal ion affinity chromatography (IMAC) and size exclusion chromatography (SEC) as described by Parmeggiani et al.²⁰ Cells were lysed by sonication and the clarified lysaic was loaded on a NiNTA superflow column (Qiagen). Lysis and washing buffer was Tris 50 mM, pH 8, NaCl 500 mM, imidazole 30 mM, glycerol 5% v/v. Lysozyme (2 mg/ml), DNAseI (0.2 mg/ml) and protease inhibitor cocktail (Roche) were added to the lysis buffer before sonication. Proteins were eluted in Tris 50 mM, pH 8, NaCl 500 mM, imidazole 250 mM, glycerol 5% v/v and dialyzed overnight either in tris 20 mM. pH 8, NaCl 150 mM. Protein concentrations were determined using a NanoDrop spectrophotometer (Thermo Scientific). Except as indicated above, enzymes and chemicals were purchased from Sigma-Aldrich. Secondary structure content, thermal stability and denaturation in presence of guanidine hydrochloride (GuHCl) were monitored by Circular Dichroism using an AVIV 420 spectrometer (Aviv Biomedical, Lakewood, N.J.). Thermal denaturation was followed at 220 mm in Tris 20 mM, 50 mM, NaCl, pH 8. Proteins were considered folded if they had the expected alpha helical CD spectrum at 25° C. and had either a sharp transition in thermal denaturation or a loss of less than 20% of 220 nm CD signal at 95° C. Chemical denaturation was monitored in a 1 cm path-length cuvette at 222 nm with protein concentration of 0.05 mg/ml in phosphate buffer 25 mM NaCl 50 mM pH 7. The GuHCl concentration was automatically controlled by a Microlab titrator (Hamilton). Oligomeric state was assessed by Analytical Gel Filtration coupled to Multiple Angle Light Scattering (AFG-MALS). A Superdex 75 10/300 GL column (or superdex200 increase for DHR59, 84, 93) (GE Healthcare) equilibrated in Tris 20 mM, NaCl 150 mM, pH 8 was used On a HPLC LC 1200 Series (Agilent Technologies) connected to a miniDAWN TREOS (Wyatt Technologies). Protein molecular weights were confirmed by mass spectrometry on a LCQ Fleet Ion Trap Mass Spectrometer (Thermo Scientific). 74 of the 83 designs were expressed solubly and had the expected alpha helical CD spectrum at 25° C. 72 were stably folded at 95° C., DHR36 has Tm=75° C. and DHR13 has a broad transition with Tm=62° C. Fifty-five of these were predominantly monodisperse, DHR49 and 76 were dimeric in solution.

### Crystallization.

[0334] Proteins were purified using NiNTA resin and SEC on a superdex 75 column (OB healthcare). Pure fractions in the gel filtration buffer (20 mM Tris pH 8.0, 150 mM NaCl) were pooled and concentrated for crystallography. Initial crystallization trials were performed, using the JCSG core I-IV screens at 22° C., and crystals were optimized if necessary. Drops were set up with the Mosquito HTS using 100 nL protein and 100 nL of the well solution. Crystals were cryoprotected in the reservoir solution supplemented with ethylene glycol, then flash cooled and stored in liquid nitrogen until data collection. All diffraction data were collected at the Advanced Light Source (ALS) at beamline 8.3.1 or beamline 8.2.1. Data reduction was carried out using XDS [symbol] and HKL2000 (RKL Research). Most of the structures reported here were solved by molecular replacement using Phaser. Search models were generated by ab initio folding of the designed sequences in Rosetta and a set of the lowest energy 10-100 models was selected for molecular replacement trials. DHR5 was the only structure which could not be readily solved by molecular replacement. However, due to the presence of 6 cysteine residues in the native protein, the DHR5 structure was solved by sulfur single wavelength anomalous dispersion (S-SAD) using a dataset collected at 7235 eV. Rigid body, restrained refinement with TLS and simulated annealing were carried out in Phenix³⁸, Manual adjustment of the model was carried out in Coor³⁹. The structures were validated using the Quality Control Check v2.8 developed by JCSG, which included Molprobity⁴⁰ (publicly available at the smb.slac.stanford web site).

### SAXS.

[0335] SAXS data on SEC-purified protein were collected at the SIBYLS 12.3:1 beamline at the Advanced Light Source, LBNL [symbol] . Scattering measurements were performed on 20 microliter samples and loaded into a helium-purged sample chamber, 1.5 m from the Mar165 detector. Data were collected on both the original gel filtration fractions and samples concentrated ˜2×-8× from individual fractions. Fractions prior to the void volume and concentrator eluates were used for buffer subtraction. Sequential exposures (0.5, 1, 2, and 5s) were taken at 12 keV to maximize signal to noise with visual checks for radiation-induced damage to the protein. The data used for fitting were selected for having higher signal to noise ratio and lack of radiation-induced aggregation. In case of concentration dependency, the lowest concentration was used. Models for SAXS comparison were obtained by adding the flexible C-terminal tag present in the constructs to the original designs and the crystal structures, generating 100 trajectories for each starting model by Monte Carlo fragment insertion²³. The results were clustered in Rosetta with a cluster radius of 2 Å and the cluster centers were used for comparison to the experimental data. We used FOXS^{43,44} to calculate scattering profiles from duster centers and fit them to the experimental data. The quality of fit between models and experimental SAXS data is usually assessed by the χ value [symbol] , which, however, suffers from over-fitting in case of noisy datasets and domination of the low region of the scattering vector (q) on the value [symbol] . To avoid artificially low values that represent false positives, we instead used Volatility Ratio (Vr) [symbol] as primary metric for fit in the range of 0.0.15 Å⁻¹<q<0.25 Å⁻¹. Vr values of models with available crystal structures range from 0.7 to 2.3. Vr=2.5 was selected as upper threshold to consider a design as validated by SAXS.

[0336] Model profiles for Vr similarity maps were obtained with a standardized fit procedure by averaging the scattering profile of the cluster centers from the five largest, clusters and fitting the solvent hydration layer with parameters C1=1.015 and C2=2.0 for all the models. Vr was calculated in the range 0.04 Å−1<q<0.3 Å−1. The order of display was derived by shape similarity of original computational models using the program damsup [symbol] for superposition.

### Computational Protocol

[0337] We have developed a method for construction of Designed Helical Repeats (DHRs) depicted in FIG. 4 and described below. We designed proteins based on repeating units formed by two helices and two loops. For all proteins this design process was completely automated and no manual refinement was involved. Using this protocol 69 proteins with diverse architectures were selected from the in silico candidates. For 14 models, an additional version that included disulphide bonds was selected, for a final list of 83 proteins that were experimentally tested. This design method has progressed over the duration of tins research and only the final design method is described below. The database described in section 1 of the supplementary corresponds to the technique used to make DHR56-83. (a) For DHR1-4,9,11-18 the repeat backbone at the centroid level was symmetric, with first and second helices and first and second loops having the same length and conformation. The design stage was not restricted, introducing structural and sequence variability between the two halves of the repeat. (b) A higher disulfide score threshold of 1.5 was initially used which resulted in many disulfide-containing structures being non-functional. (c) We initially used ambiguous constraints between the helices. Ambiguous constraint gave a score bonus to i centroid models when a helix was within 10 Å to a helix in adjacent repeat. These constraints were found to disrupt loops, and result in many structures that would not fold during simulations. (d) DHR31-55 contained a displacement between helices, which resulted in highly twisted structures. This displacement was observed when the ABEGO loop types GBB and BAB were coupled with specific helix lengths. An improved sampling strategy with increased number of Monte Carlo steps was also used in these cases.

[0338] In some examples, computer software such as the Rosetta software suite (or, briefly, Rosetta), can be used to carry out at least part of the herein-described methods, protocols, and/or techniques. However, the herein-described methods and techniques are not limited to use of Rosetta or any other specific software package. For example, other software programs could be used in conjunction with this method to model multi-component symmetric protein nanostructures. As will be understood by those of skill in the art, the implementation of the design methods described herein is non-limiting, and the methods are in no way limited to the implementation disclosed herein.

[0339] Each of the following sections describes one step in Rosetta examples and corresponds to the flow chart in FIG. 4.

### 1 Backbone Design

[0340] The backbone design stage employs a simplified side chain representation (centroid) [symbol] . The backbone assembly procedure begins by picking fragments harvested directly from a non-redundant set of structures from PDB [symbol] . The fragments contain only residues that fall into the space of phi-psi backbone angles of either helices or loops depending on the desired secondary structure. Loop fragments could be further specified to fall within desired ABEGO bins³ as described by Koga et al. [symbol] .

[0341] The fragments were assembled using a Monte-Carlo sampling procedure that was initialized with ideal-helices and extended loops. After every fragment sampling step, which was allowed only in the first repeat unit and at the junction between the first and the second units, the change was propagated to all downstream repeats and scored. The score function we used considered van der Waals interactions; packing, values of backbone dihedral angles, and radius of gyration (RG) that was applied to only the first and second repeat-unit (RG-local). The RG term promotes, the formation of globular proteins so applying RG to the whole model produced only highly curved structures. The sampling procedure in the database used 1500. Monte Carlo fragment insertions and was further improved to 3200 steps ordered as following: 100 Monte Carlo moves with 9 residue fragments then 100 moves with 3 residue fragments, both allowed only in loops. The loop sampling was followed by 1500 moves with 9 residue fragments and 1500 moves with 3 residue fragments, both in helices and loops (improved sampling). The improvements resulted in a 3.3 times increase of acceptance at the centroid stage. The backbone was represented as poly-tyrosine during the centroid building, maintaining enough space within the core to accommodate both small and large side chains in the design step.

[0342] Using this procedure we designed 2.88 million backbones by making 500 structures for each of 5776 different secondary structure combination.

### 2 Backbone Quality Filter: RMSD Loop Threshold and Motif Score

[0343] Designed backbones were screened fro native-like features. First, loops were checked so that there was at feast one 9-residue fragment from the PDB database within 0.4 Å RMSD on every position in the structure (RMSD loop threshold). To do this we used the worst9mer filter in Rosetta [symbol] . Second, the design-ability of each residue was measured by the number of pairwise side chain interactions observed in the PDB database, considering the backbone position of the two residues involved (motif score, unpublished results). Backbones with fewer than 1.5 interactions per residue were filtered out. Of the 2.88 million initial backbones 66,776 structures passed these filters.

### 3 Sequence Design—Fast

[0344] Starting from the filtered backbone conformations, we used one pass of Rosetta design [symbol] to generate repeated sequences.

### 4 Packing Filters—Low Threshold

[0345] After completing-sequence design the models were filtered out if the helices were either too far apart, creating cavities in the core (poor Rosetta holes [symbol] score, >1.75), or too close together with an alanine-rich/unspecific core packing (% alanine residues>25%). Of the 66,7776 structures that passed centroid 11,243 pass this filter.

### 5 Structure Profile

[0346] The structure profile biases the sequence composition towards the sequences in native proteins with similar local structure. To construct the structural profile, the sequences from the closest 100 9-residue fragments within 0.5 Å RMSD to the designed structure were used. The code to construct the structural profile is included with Rosetta as generate_struct_profile.rb in tools/pdb2vall. The structure profile was used in the same way as the sequence profile described by Parmeggiani et al.

[symbol]

### 6 Sequence Design—Multipass

[0347] Starting from the filtered backbone conformations, we used Rosetta design to generate repeated sequences while minimizing the overall energy [symbol] , increasing core packing as measured by Rosetta holes [symbol] and improving the psipred secondary structure prediction [symbol] . After the first round of sequence refinement the N and C terminal repeats (capping repeats) display exposed hydrophobic residues. The sequence design procedure was rerun for these repeats without a symmetric sequence to introduce polar amino acids.

### 7 Packing Filters—High Threshold

[0348] After completing sequence design the models were filtered out for poor packing, (holes score, <0.5). After this stage we obtained 1980 structures.

### 8 Exploration of the Energy Landscape

[0349] The designs were validated using Rosetta ab initio structure prediction using Rosetta@Home [symbol] . In Rosetta ab initio prediction the energy landscape is explored using independent simulations starting from an extended structure. The distribution of the stimulation results is expressed in terms of energy and distance from the target fold as root mean square deviation (RMSD). A successful design produces a distribution in the shape of a funnel with the minimum corresponding to low energy and low RMSD models and no alternative minima.

[0350] For each structure, seven family members were made from the same topology, some with increased hydrogen bond potential. Proteins where multiple family members had successful simulations were selected. The member of the family with the tightest folding funnel was chosen by visual inspection and the corresponding gene was ordered for experimental testing. Extended data FIG. 3 illustrates the folding funnel and sequence diversity for one topology.

[0351] For the database we have 761 structures that have at least one family member <3.0 RMSD from the design.

### 9 Add Disulphides

[0352] Additional, versions with stabilizing inter-repeat disulphide bonds were also generated. Potential disulphides were scored using RosettaRemodel [symbol] and if the disulphide score was <0 they were considered.

### Time Estimates

[0353] Backbone design: on a singe core of a Xeon E5-2650 took 104.5 seconds to build a structure with a 19H-2L-20H-3L topology, the median topology in the database. With an average design time of 104.5 seconds per model, if would take 3493 compute days on a single core to generate the 2.8 million structures.

[0354] Sequence design—multipass: the multipass design of sequence and capping residues takes 2.1 hours for a model with 17 length helices and 3 length loops on a single core of a Xeon E5-2650.

Exploration of the energy landscape: on a single core of a Xeon E7-2850@2.00 GHZ a model with 17 residues helices and 3 residues loops is produced in 19:7 minutes. Where the computation was run on Rosetta@Home; the average was 26.7 minutes. With 7 sequences per family and a minimum of 1000 models to suitably explore the landscape it would take 130 compute days per structure.

### Geometrical Parameters of Designed Helical Repeat Proteins

[0355] 1) Global parameters
[0356] 2) Extracting parameters from naturally occurring repeats
[0357] 3) Local parameters

### 1) Global Parameters

[0358] Class 3 repeat proteins, as described by Kajava A. [symbol] , form solenoid structures that can be described in term of global helical parameters that relate the position of one repeat to the next one: radius (r), twist or angle between adjacent repeats around the helical axis (twist, ω) and translation between adjacent repeats along the helical axis (z).

[0359] Parameters for Designed Helical Repeat proteins (DHRs) and crystal structures, together with the Cα RMSD values were measured on the two central repeats using the RepeatParameter filter available in Rosetta.

[0360] Radius and twist are inversely correlated and their distribution of whole set describes a hyperbolic shape, which can be represented as two symmetric ones, when considering the handedness of the superhelix in the ω value. Handedness refers to the superhelix described by the center of mass of the repeats, z is broadly distributed, with maximum values around 16 Å.

### 2) Extracting Parameters From Naturally Occurring Repeats

[0361] A set of alpha-helical solenoid proteins were curated from the repeatsDB (category III.3.) [symbol] to remove both proteins that had above 90% sequence identity [symbol] and previously designed repeat proteins. After curation, 258 proteins remained out of 923. We then automatically extracted repeat units, which consisted of 3 subsequent repeats, that differed by less than 3 residues in length and had a high degree of structural similarity as measured by having a TM score [symbol] of greater than 0.75. The requirement of high structural similarity cut down the number Of repeat proteins to 81. Repeat units were identified by the method described by RAPHAEL [symbol] implemented in Rosetta and improved. This method measures the distance from residues in the protein to random points placed around the protein. Equally spaced inflection points, where a residue was furthest or closest to these random points indicated the start of a repeat.

[0362] We found that inflection points occurred at random in repeat protein loops. To ensure each repeat was cut at the same location, the first residue in each repeat was chosen to be the loop-helix transition closest to the transition point. The code for this is available as extractNativeRepeats in Rosetta after git branch c876538. After locating repeats we assigned the class name of each repeat based on the PDB assignment in the Pfam database [symbol] . The Rise/Omega/Twist parameters were calculated by superimposing the first repeat-unit onto the second using TM-align [symbol] then calling the parameter calculators and averaging the values within the same protein. This approach does not provide an extensive coverage of ail the possible curvatures tor each family but an indication of the protein average values.

### 3) Local Parameters

[0363] Local parameters describe the helix-helix interactions and, due to the repeating structures, only two interactions are needed to capture the local geometry: helix1.1-helix1.2 within a repeat and helix1.1-helix2.1 between first and second repeat. Angle between helices and distance between helix centers of mass were used as parameters, extracted with a modified version of the publicly available script that can be found at the web site pymolwiki., Secondary structure definition were assigned using DSSP [symbol] . For the two central repeats, all atoms RMSDs between Crystal structures and design are reported. Repeat handedness, as defined by Kobe and Kajava [symbol] , indicates the rotation of the main chain going from the N- to the C-terminal around the axis connecting the repeat centers of mass.

### Structure and Sequence Comparison

[0364] Structural comparison of experimentally validated designs with representative repeat proteins from repeatDB [symbol] revealed that DHRs cluster in different families than the existing repeat proteins. Additionally, designs are equally distributed between, right-handed and left-handed architecture, as referred to the repeat handedness (see local parameters above), in contrast to known alpha helical repeat proteins, which are mostly right-handed. This result indicates that tire handedness observed is not an intrinsic limitation of repeat proteins structures but the result of a bias during evolution.

### Structure Determination Remarks

[0365] Due to the presence of 6 cysteine residues in the native protein, the DHR5 structure was solved by sulfur single wavelength anomalous dispersion (S-SAD) using a dataset collected at 7235 eV. A search for 6 individual sulfur atoms in SHELXD gave many clear solutions that led to near complete autobuilding of a poly-alanine backbone in SHELXE, which was further elaborated using tire Autobuild module of Phenix. Ultimately, the final model for DHR5 was in good agreement with the design target structure, despite our initial difficulties in phasing by molecular replacement. While the SAD data set was limited to 1.85 Å, the final model was refined against the original data, set (1.25 Å). Both data sets were deposited in the Protein Data Bank.

[0366] The asymmetric unit for DHR8 was found to contain 4 copies of DHR8. Although the overall; structure of the 4 copies is similar, the electron density for the N-terminal helix from two of these monomers is weak, suggesting that these helices are partially disordered in the crystal, Indeed, crystal packing of these helices hi the designed conformation would have led to significant steric overlap with one another. As the corresponding helices in the remaining two DHR8 monomers were well-ordered and essentially as designed, these fully ordered models were used for further analysis.

[0367] The dataset collected for DHR14 had a large non-origin Patterson peak at fractional coordinates (0.000,0.217, 0.000), suggesting the presence of translational NCS. However, consideration of the apparent space group, unit cell parameters, and plausible solvent content strongly indicated the presence of a single copy of DHR14 in the asymmetric unit. Given the relatively low pitch of this helical design and the translational pseudosymmetry between the N- and C-terminal halves of the protein, we suspected that intramolecular pseudotranslational NCS might account for the observed Patterson peak. Ultimately., a molecular replacement solution was obtained using 4 of the 8 designed helices of DHR14, and this was sufficient to bootstrap autobuilding of the remaining backbone using SHELXE. In the final model, the helical axis of DHR14 is closely aligned with the crystallographic b axis, and pseudotranslational NCS between the N- and C-terminal repeats with a translation of ˜21 Å is in good agreement with the observed fractional Patterson peak at ˜0.22 along b.

### Small Angle X-ray Scattering (SAXS) Analysis

[0368] Guinier and P(r) analysis were done using using ATSAS [symbol] . The Porod exponent was determined from a linear regression analysis (I vs q) of the top of the first peak in the Porod-Debye plot (q⁴*I(q) vs q⁴) of the scattering data, implemented in SCÅTTER, available at beamline 12.3.1 [symbol] . The molecular mass in solution was calculated using SCÅTTER [symbol] .

[0369] 25% of the designs had molecular weights in solution that were significantly greater than the predicted molecular weight (1.2-4 fold), suggesting that these designs formed multimeric assemblies or a small portion of aggregates [symbol] . All 55 designs had Porod exponents (P_{E}) greater than 2.9, indicating significant levels of folded protein; 67% of the designs had a P_{E} of 3.4-4, indicating a well-folded core [symbol] . Of the 15 proteins that crystallized, the majority (66%) had P_{E} of 3.9-4, consistent with more well-packed proteins being easier to crystallize.

[0370] Radius of gyration (Rg) and maximum of distance distribution (dmax) were calculated from real space distance distribution P(r). Among the models confirmed by crystallography, DHR 49 and 76 formed dimers in solution. The experimental data were fit using models based on the dimer configuration observed in the crystal structure. DHR 5 tendency to aggregation (see SEC in supporting_experimental_data.pdf) affected the SAXS profile resulting In a high Molecular weight and Vr above our acceptance threshold,

[0371] If molecular mass and Rg of models were within a 25% error from experimental data and Vr was below 2.5, the models were considered able to recapture the SAXS data. Dmax errors are generally within 25%.

[0372] 43 designs satisfied our requirements: DHR 1 2 3 4 7 8 9 10 14 15 18 20 21 23 24 26 27 31 32 36 39 46 47 49 52 53 54 55 57 58 59 62 64 68 70 71 72 76 77 7879 80 81 82.

TABLE 3
Protein Sequences (including optional His-tags at C-terminus)

| name | sequence |
|---|---|
| DHR1 | MGCDQVAKDASSTIREVIEKNPNYGEKVADVAAKIVKKIIEGNPNGCDCVAKAASSIIRAVIEKNPNYSEV |
| | VADVAAAIVKAIIEGNPNGCDCTAKAASSIIRAVIEKNPNYSSVVADVAAAIVKAIIEGNPNGRDCVRKAA |
| | SSIIRAVQEKNPNYSEVVEDVKRAIEKAIKEGNPNGWLEHHHHHH (SEQ ID NO: 498) |
| DHR2 | MSDADEAAKEANKAENKARNRNDDEAAKAVKLIKEAIERAKKRNESDAVEAAKEAAKALNKALNRNDDEAA |
| | KAVALIAEAIIRALKRNESDAVEAAKEAAKALNKKALNRNDDEAAKAVALTAEAIIRALKRNESDAVEKAKE |
| | AAKNLNKALNRNDDEQAKHVAKQAENIIRALKRNESWLEHHHHH (SEQ ID NO: 499) |
| DHR3 | MSSEDTVRKIAQKCSEAIRESNDCEEAARKCAKTISEAIRESNSSELAVRIIAQVCSEAIRESNDCECAAR |
| | ICAKIISEAIRESNSSELAVRIIAQVCSEAIRESNDCECAARICAKIISEAIRESNSSELAKRIIKQVCSE |
| | AKRESNDTECAKRICTKIKSEAKRESNSWLEHHHHHH (SEQ ID NO: 500) |
| DHR4 | MSYEDECEEKARRVAEKVERLKRSGTSEDEIAEEVAREISEVIRTLKESGSSYEVICECVARIVAEIVEAL |
| | KRSGTSEDEIAEIVARVISEVIRTLKESGSSYEVICECVARIVAEIVEALKRSGTSEDEIAEIVARVISEV |
| | IRTLKESGSSYEVIKECVQRIVEEIVEALKRSGTSEDEINEIVRRVKSEVERTLKESGSSWLEHHHHHH |
| | (SEQ ID NO: 501) |
| DHR5 | MSSEKEELRERLVKICVENAKRKGDDTEEAREAAREAFELVREAAERAGIDSSEVLELAIRLIKECVENAQ |
| | REGYDISEACRAAAEAFKRVAEAAKRAGITSSEVLELAIRLIKEVENAQREGYDISEACRAAAEAPKRVA |
| | EAAKRAGITSSETLKRAIEEIRKRVEEAQREGNDISEACRQAAEEFRKKAEELKRRGDGWLEHHHHHH |
| | (SEQ ID NO: 502) |
| DHR6 | MSEEKEEALKKVREAAKKLGSSDEEARKCFEEAREWAERTGSSAYEAAEALFKVLEAAYKLGSSAEEACEC |
| | FNQAAEWAERTGSGAYEAAEALFKVLEAAYKLGSSAEEACECFNQAAEWAERTGSGAYEAAERLFEELERA |
| | YEEGSSAEEACEEFNKKEEAHRKGKKWLEHHHHHH (SEQ ID NO: 503) |
| DHR7 | MSTKEDARSTCEKAARKAAESNDEEVAKQAAKDCLEVAKQAGMPTKEAARSFCEAAARAAAESNDEEVAKI |
| | AAKACLEVAKQAGMPTKEAARSFCEAAARAAAESNDEEVAKIAAKACLEVAKQAGMPTKEAARSFCEAAKR |
| | AAKESNDEEVEKIAKKACKEVAKQAGMPWLEHHHHHH (SEQ ID NO: 504) |
| DHR8 | MSDEMKKVMEALKKAVELAKKNNDDEVAREIERAAKEIVEALRENNSDEMAKVMLALAKAVLLAAKNNDDE |
| | VAREIARAAAEIVEALRENNSDEMAKVMLALAKAVLLAAKNNDDEVAPEIARAAAEIVEALRENNSDEMAK |
| | KMLELAKRVLDAAKNNDDETARELARQAAEEVEADRENNSWLEHHHHHH (SEQ ID NO: 505) |
| DHR9 | MSYEDEAEEKARRVAEKVERLKRSGTSEDEIAEEVAREISEVIRTLKESGSSYEVIAEIVARIVAEIVEAL |
| | KRSGTSEDEIAEIVARVISEVIRTLKESGSSYEVIAEIVARIVAEIVEALKRSGTSEDEIAEIVARVISEV |
| | IRTLKESGSSYEVIKEIVQRIVEEIVEALKRSGTSEDEINEIVRRVKSEVERTLKESGSSWLEHHHHHH |
| | (SEQ ID NO: 506) |
| DHR10 | MSSEKEELRERLVKIVVENAKRKGDDTEEAREAAREAFELVREAAERAGIDSSEVLELAIRLIKEVVENAQ |
| | REGYDISEAARAAAEAFKRVAEAAKRAGITSSEVLELAIRLIKEVVENAQREGYDISEAARAAAEAFKRVA |
| | EAAKRAGITSSETLKRAIEEIRKRVEEAQREGNDISEAARQAAEEFRKKAEELKRRGDGWLEHHHHHH |
| | (SEQ ID NO: 507) |
| DHR11 | MSDADRAAKEANKAENKARNRNDDEAAKAVKLCKEAIERAKKRNESDAVEAAKEAAKALNKALNRNDDEAA |
| | KAVALCCEAIIRALKRNESDAVEAAKEAAKALNKALNRNDDEAAKAVALCCEAIIRALKRNESDAVEKAKE |
| | AAKNLNKALNRNDDEQAKHVAKQCENIIRALKRNESWLEKHHHHHH (SEQ ID NO: 508) |
| DHR12 | MDDEEQCREIAEKAKQTYTDDEEIARIIAEAARQTTTDDEETCRCIAEAAKQTYTDDEEIARIIAYAARQT |
| | TTDDEEICRCIAEAAKQTYTDDEEIARIIAYAARQTTTDDEEIERCIEEAAKQTYTDDEEIERIKEYARRQ |
| | TTTDGWLEHHHHHH (SEQ ID NO: 509) |
| DHR13 | MNAEDKAREVLKELKDEGSPEEEAARQVLKDLNREGSNAEDAARAVLKALKDEGSPEEEAARAVLKALNRE |
| | GSNAEDAARAVLKALKDEGSPEEEAARAVLKALNREGSNEEDASRAVLKALKDEGSPEEEARRAVEKALNR |
| | EGSNGWLEHHHHHH (SEQ ID NO: 510) |
| DHR14 | MDSEEVNERVKQLAEKAKEATDKEEVIEIVKELAELAKQSTDSELVNEIVKQLAEVAKEATDKELVIYIVK |
| | ILAELAKQSTDSELVNEIVKQLAEVAKEATDKELVIYIVKILAELAKQSTDSELVNEIVKQLEEVAKEATD |
| | KELVEHIEKILEELKKQSTDGWLEHHHHHH (SEQ ID NO: 511) |
| DHR15 | MNDERQKQREEVRKLAEELASKATDEELIKEIKKCAQLAEELASRSTNDELIKQILEVAKLAFELASKATD |
| | EELIKEILKCCQLAFELASRSTNDELIKQILEVAKLAFELASKATDEELIKEILKCCQLAFELASRSTNDE |
| | EIKQILETAKEAFERASKATDEEEIKEILKKCQEKFEKKSRSTNGWLEHHHHHH (SEQ ID NO: 512) |
| DHR16 | MNDKAKEAEELLRKALEKAEKENDETAIRCVELLKEALERAKKNNNDKAIEAVELLAKALEKALKENDETA |
| | IRCVCLLAEALLRALKNNNDKAIEAVELLAKALEKALKENDETAIRCVCLLAEALLRALKNNNDKAIEEVE |
| | RLAKELEKALKENDETKIREVCERAEELLRRLKNNNGWLEHHHHHH (SEQ ID NO: 513) |
| DHR17 | MSSEDAREKIEQLCREAKEIAERAKQQNSQEEAREAIEKLLRIAKRIAELAKQANQSEVAREAIECLCRIA |
| | KLIAELAKQANSQEVAREAIEALLRIALIAELAKQANQSEVAREAIECLCRIAKLIAELAKQANSQEVAR |
| | EAIEALLRIAKLIAELAKQANQSEVAREAIECLSRIAKLIEELAKQASQEVKREAQEALDRIQKLIEELQ |
| | KQANQGWLEHHHHHH (SEQ ID NO: 514) |
| DHR18 | MDIEKLCKKAESEAREARSKAEELRQRHPDSQAARDAQKLASQAEEAVKLACELAQEHPNADIAKLCIKAA |
| | SEAAEAASKAAELAQRHPDSQAARDAIKLASQAAEAVKLACELAQEHPNADIAKIKAASEAAEAASKAA |
| | ELAQRHPDSQAARDAIKLASQAAEAVKLACELAQEHPNADIAKKCIKAASEAAEEASKAAEEAQRHPDSQK |
| | ARDEIKEASQKAEEVKERCERAQEHPNAWLEHHHHHH (SEQ ID NO: 515) |
| DHR19 | MDEIEKVREEAEKLKKKTDDEDVLEVAREAIRAAKEATSDEILKVIKEALKLAKKTTDKDVLEVAREAIRA |
| | AEEATDDEILKVIKEAKLAKKTTDKDVLEVAREAIRAAEEATDEEILKEIKEALKKAKETTDTEELEKAR |
| | EQIRKAEESTDGWLEHHHHHH (SEQ ID NO: 516) |
| DHR20 | MSDIEEIRQLAEELRKKSDNEEVRKLAQEAAELAKRSTDSDVLEIKDALELAKQSTNEEVIKLALKAAVL |
| | AAKSTDSDVLSIVKDALELAKQSTNEEVIKLALKAAVLAAKSTDEEVLEEVKEALRRAKESTDEEEIKEEL |
| | RKAVEEAESTDGWLEHHHHHH (SEQ ID NO: 517) |
| DHR21 | MSEKEKVEELAQRIREQLPDTELAREAQELADEARKSDDSEALKVVYLALRIVQQLPDTELAREALELAKE |
| | AVKSTDSEALKVVYLALRIVQQLPDTELASEALELAKEAVKSTDQEALKSVYEALQRVQDKPNTEEARESL |
| | ERAKEDVKSTDGWLEHHHHHH (SEQ ID NO: 518) |
| DHR22 | MDDAEELRERARDLLRKKGSSEEEIKKVDEELEKIVRKADSDDAVKLAVKAAALLAENGSSAEEIVKVLEE |
| | LLKIVEKADSDDAVKLAVKAAALLAENGSSAEEIVKVLEELLKIVEKADSEEEVKDAVREAAELAERGSSA |
| | EEIRKQLKDRLRKVEESDSGWLEHHHHHH(SEQ ID NO: 519) |
| DHR23 | MSDSEKLAKRVLKELKRRGTSDEELERMKRELEKIIKSATSSDAMRLALRRVVLELVRRGTSSEILEKMMRM |
| | LIKIIQSATSSDAMRLALRVVLELVRRGTSSEILEKMMRMLIKIIQSATSDDQMREALRQVLEEVRKGTSS |
| | EQLERSMRKLIKEIKKRTSGWLEHHHHHH (SEQ ID NO: 520) |
| DHR24 | MSEAEELARRAAKEAKELCKRSTDEELCKELKKLAELLKELAERYPDSEEAAKLALKAALEAIELCKQSTDE |
| | ELCEELVKLAQKLIELAKRYPDSEAAKLALKAALEATELCKQSTDEELCEELVKLAQKLIELAKRYPDSEE |
| | AKRALKEAKELIEQCKESTDEDECRELVKRAEELIREAKENPDGWLEHHHHHH (SEQ ID NO: 521) |
| DHR25 | MDERDKVRELIDRVEKELKREGTSEELIEEIRKVLKKAKEAADSDDDEAIKVAKEIVRVILELVREGTSSE |
| | LIEEILKVLSLAAEAAKSTDDEAIKVAKEIVRVILELVREGTSSELIEEILKVLSLAAEAAKSTDEEAIKK |
| | AKETVRRILELTREGTSEEEIREELELRKKAQKAKSPEGWLEHHHHHH (SEQ ID NO: 522) |
| DHR26 | MDECERLRQEVEKAEKELEKLAKQSTDEEVRQIAREVAKQLRRLAEEACRSNSDECLRLASEVVKAVQELV |
| | KLAEQATDEEVIRVALEVARELIRLAQEACRSNDDECLRLASEVVKAVQELVKLAEQATDEEVIRVALEVA |
| | RELIRLAQEACRSNDEECLREASEVVKEVQELVKEAEKSTDEEEIRELLQRAEERIREAQERCREGDGWLE |
| | HHHHHH (SEQ ID NO: 523) |
| DHR27 | MTRQKEQLDEVLEEIQRLAEEARKLMTDEEEAKKIQEEAERAKEMLRRAVEKVTDNEVIEKLLEVVKEIIR |
| | LAEEAMKKMTDEEEAAKIAKEALEAIKMLARAVEEVTDNEVIEKLLEVVKEIIRLAEEAMKKMTDEEEAAK |
| | IAKEALEAIKMLARAVEEVTDKERIEQLLREVKEEIRRAEEESRKETDDEEAAKRAREALRRIRERAREVE |
| | EDKDGWLEHHHHHH (SEQ ID NO: 524) |
| DHR28 | MDEEVQRIREEVRRAIEEVRESLERNDSSEEAEELAREALERVAEEVKESIKERPDRDLATEAIRALVRLAI |
| | EIVRLALEQNDSELAREVAEEALRAVAEVVKEAIRQRGDRDLAIEAIRALVRLAIEIVRLALEQNDSELAR |
| | EVAEEALRAVAEVVKEAIRQRGDRELAKEAIRALRRLAEEIRRLAEEQNDDELAREVEEIAREAIEEVRKE |
| | LERQRPGRGWLEHHHHHH (SEQ ID NO: 525) |
| DHR29 | MSEVEESAQEVEKRAQEVREEAERRGTSQEVLDEIKRVVDEARQLAQRAKESDDSEVAESALQVVREALKV |
| | VLSALERGTSEEVLKEILRVVSEAIKLALEAIKSSDSEVAESALQVVREALKVVLSALERGTSEEVLKEIL |
| | RVVSEAIKLALEAIKSSDSETARRALEKVRESLKEVLEQLERGTSEEELRESLREVSENIRKALEEIKSPD |
| | GWLEHHHHHH (SEQ ID NO: 526) |
| DHR30 | MSTVKELLDRARELMRELAERASEQGSDEEEARKLLEDLEQLVQEIRRELEETGTSSEVTRLIAKAIMLMA |
| | ELALRAAEQGSDAEEAMKLLKDLLRLVLEILRELRETGTDSEVIRLIAKAIMLMAELALRAAEQGSDAEEA |
| | MKLLKDLLRLVLEILRELRETGTDKEEIRKVAEEIMRRAKTALDEARQGSDAEEAMKRLKEQLRRILERLR |
| | EEREKGTDGWLEHHHHHH (SEQ ID NO: 527) |
| DHR31 | MDSYTERARKAVKRYVKEEGGSEEEAEREAEKVREEIRKKASDSYLIQAAAAVVAYVIEEGGSPEEAVKIA |
| | EEVVRRIKEKADDSYLIQAAAAVVAYVIEEGGSPEEAVKIAEEVVRRIKEKADDRELIRRAAERVAEVIER |
| | GGSPEEAVKEAEKEVKKQKEESDGWLEHHHHHH (SEQ ID NO: 528) |
| DHR32 | MSIQEKAKQSVIRKVKEEGGSEEEARERAKEVEERLKKEADDSTLVRAAAAVVLYVLEKGGSTEEAVQRAR |
| | EVIERLKKEASDSTLVRAAAAVVLYVLEKGGSTEEAVQRAREVIERLKKEASDEELIREAAKEVLKVLEEG |
| | GSVEEAVERARERIEELQKRSDDGWLEHHHHHH (SEQ ID NO: 529) |
| DHR33 | MSETEEVKKLVEEKVKKEGGSPEEAKEVTEELKEESQDSTLLKVAALVASAVLKEGGSPEEAAETAK |
| | EVVKELRKSASDSTLLKVAALVSAVLKEGGSPEEAAETAKEVVKELRKSASDEELLKEAARQAEESLRQG |
| | KSPEEAAEEAKSEVKKLKEKSQDGWLEHHHHHH (SEQ ID NO: 530) |
| DHR34 | MSETEEVKKLCEEKVKKEGGSPEEAKETAKEVTEELKEESQDSTLLKVAALCASAVLKEGGSCEEAAETAK |
| | EVVKELRKSASDSTLLKVAALCASAVLKEGGSCEEAAETAKEVVKELRKSASDEELLKEAARQAEESLRQG |
| | KSCEEAAEEAKKEVKKLKEKSQDGWLEHHHHHH (SEQ ID NO: 531) |
| DHR35 | MSEEDEVAKQASRYAKEQGGDPEKSREEAEKALEEVKKQATSSEALQVALEAAYASEEGEDPAEALKEAA |
| | RALEEVRRSATSSEALQVALEAARYASEEGEDPAEALKEAARALEEVRRSATSEEDLKEALDRAREASERG |
| | QNPAESLKEAAEELKKKKEKSSDGWLEHHHHHH (SEQ ID NO: 532) |
| DHR36 | MSDLEKALKRFVKEEKKKGRNPEEAKKEAKKLKKKLKKSAGSSDLLTALAKFVLEEVRKGRNPEEAVKEAI |
| | KLAEKLKRSAGSSDLLTALAKFVLEEVRKGRNPEEAVKEAIKLAEKLKRSAGSSEQLEKLATKVLEEVKKG |
| | RNPKRAVEEAIKQAKEDRKRSNSGWLEHHHHHH (SEQ ID NO: 533) |
| DHR37 | MSSTERAAQSVKKYLQQQGDPDQAQKKAQEVKENIEKEANSSSVIRAAAAVVFYLLEQGYDPDQALKKAQ |
| | EVARNIENEANSSSVIRAAAAVVFYLLEQGYDPDQALKKAQEVARNIENEANSDDVIKEAAKVVYKRLEEG |
| | QDPDKALEEARKRAQKTEKKTTSGWLEHHHHHH (SEQ ID NO: 534) |
| DHR38 | MSSTERAAQSCKKYLQQQGDPDQAQKKAQEVKENIEKEANSSSVIRAAAACVFYLLEQGYDCDQALKKAQ |
| | EVARNIENEANSSSVIRAAAACVFYLLEQGYDCDQALKKAQEVARNIENEANSDDVIKEAAKVVYKRLEEG |
| | QDCDKALEEARKRAQTEKKTTSGWLEHHKKHH (SEQ ID NO: 535) |
| DHR39 | MSDLQEVADRIVEQLKREGRSPEEARKEARRLIEELKQSAGGDSELIEVAVRIVKELEEQGRSPSEAAKEA |
| | VELIERIRRAAGGDSELIEVAVRIVKELEEQGRSPSEAAKEAVELIERIRRAAGGDSDRIKKAVELVRELE |
| | ERGRSPSEAARRAVEEIQRSVEEDGGNGWLEHHHHHH (SEQ ID NO: 536) |
| DHR40 | MSESDEVAKRISKEAKKEGRSEEEVKELVERFREAIEKLKEQGDSEAIRVAVEIADEALREGLSPEEVVEL |
| | VERFVQAIQKLQENGESEAIRVAVEIADEALREGLSPEEVVELVERFVQAIQKLQENGEEDEIQKAVETAQ |
| | EQLEEGRSPKEVVETVEEQVKEVEEKQQGEGWLEHHHHHH (SEQ ID NO: 537) |
| DHR41 | MSDIEKAKRIADRAIDVVRKAAEKEGGSPEKIREALQQAKRCASKLIRLVKEAQESNSSDVREAARVALEA |
| | VRVVVRAAEEKGGSPEEVVEAVCRAVRCAEKLIRLVKRAEESNSSDVREAARVALEAVRVVVRAAEEKGGS |
| | PEEVVEAVCRAVRCAEKLIRLVKRAEESNSENVRESARRALEKVLKTVQQAEEEGKSPEEVVEQVCRSVRK |
| | AEEQIRETQERERSTSGWLEHHHHHH (SEQ ID NO: 538) |
| DHR42 | MSDAEEVKKQAEEIANRAYKTAQKQGESDSRAKKAEKLVRKAAEKLARLIERAQKEGDSDALEVARQALEI |
| | ARRAPETAKKQGHSATEAAKAFVDVVEAAISLAELIISAKRQGDSDALEVARQALEIARRAFETAKKQGHS |
| | ATEAAKAFVDVVEAAISLAELIISAKRQGDQKALEIARKALQKAKENFEEAQKRGESATQAAKRFVDTVEK |
| | ETKKAQEQIKRERKGDGWLEHHHHHH (SEQ ID NO: 539) |
| DHR43 | MSKEEELIEKARRVAKEAIEEAKRQGKDPSEAKKAAEKLIKAVEEAVKEAKRLKEEGNSELAELISEAIQV |
| | AVEAVEEAVRQGKDPFKAAEAAAELIRAVVEAVKEAERLKREGNSELAELISEAIQVAVEAVEEAVRQGKD |
| | PFKAAEAAAELIRAVVEAVKEAERLKREGNSELAKKINDTIREAVREVQQAVEDGKDPFEAAREAAEKIRE |
| | SVERVREEEEKKRRGNGWLEHHHHHH (SEQ ID NO: 540) |
| DHR44 | MSNEQEKKDLKKAEEAAKSPDPELIREAIERAEESGSNKAKEIILRAAEEAAKSPDPELIRLAIEAAERSG |
| | SNKAKEITLRAAEEAAKSPDPELIRLAIEAAERSGSEKAKEIIKRAAEEAQKSPDPELQKLAKEARERLGG |
| | WLEHHHHHH (SEQ ID NO: 541) |
| DHR45 | MSSEEEELEKDAREASESGADPEWLREIVDLARESGDSEVIELAKRALEAAKSGADPEWLLRIVRQAEESG |
| | SSEVIELAKRALEAAKSGADPEWLLRIVRQAEESGSEEVIELAKRALEEAKKGKDPKELLEEVRKREESGG |
| | WLEHHHHHH (SEQ ID NO: 542) |
| DHR46 | MSTKEEKERIERIEKEVRSPDPENIREAVRKAEELLRENPSTEAEELLRRAIEAAVRAPDPEAIREAVRAA |
| | EELLRENPSTEAEELLRRAIEAAVRAPDPEAIREAVRAAEELLRENPSEEAKELLRRAIESAKKAPDPEAQ |
| | REAKRAEEELRKEDPGWLEHHHKHH (SEQ ID NO: 543) |
| DHR47 | MSTKEEKERIERIEKEVRSPDCENIREAVRKAEELLRENPSTEAEELLRRAIEAAVRCPDCEAIREAVRAA |
| | EELLRENPSTEAEELLRRAIEAAVRCPDCEAIREAVRAAEELLRENPSEEAKELLRRAIESAKKCPDPEAQ |
| | REAKRAEEELRKEDPGWLEHHHHHH (SEQ ID NO: 544) |
| DHR48 | MNSREEEEAKRIVKEAKKSGFDPEEVEKALREVIRVAEETGKSEALKEALKIVEEAAKSGYDPAEVAKALA |
| | EVIRVAEETGNSEALKEALKIVEEAAKSGYDPAEVAKALAEVIRVAEETGNPEELKEALKRVLEAAKRGED |
| | PAQVAKELAEEIRRNQEEGGWLEHHHHHH (SEQ ID NO: 545) |
| DHR49 | MDSEEEQERIRRILKEARKSGTEESLRQAIEDVAQLAKKSQDSEVLEEAIRVILRIAKESGSEEADRQAIR |
| | AVAEIAKEAQDSEVLEEAIRVILRIAKESGSEEALRQAIRAVAEIAKEAQDPRVLEEAIRVIRQIAEESGS |
| | EEARRQAERAEEEIRRRAQGWLEHHHHHH (SEQ ID NO: 546) |
| DHR50 | MDPEEVRREVERATEEYRKNPGSDEAREQLKEAVERAEEAARSPDPEAVQVAVEAATQIYENTPGSEEAKK |
| | ALEIAVRAAENAARLPDPEAVQVAVEAATQIYENTPGSEEAKKALEIAVRAAENAARLPDPEAVRVAEEAA |
| | DQIRKNTPGSELAKRADEIKKRARELLERLPGWLEHHHHH ((SEQ ID NO: 547) |
| DHR51 | MQSEDRKEKIRELERKARENTGSDEARQAVKEIARIAKEALEEGNADTAKEAIQRLEDLARDYSGSDVASL |
| | AVKAIAKIAETALRNGYADTAKEAIQRLEDLARDYSGSDVASLAVKAIAKIAETALRNGYKETAEEAIKRL |
| | RELAEDYKGSEVAKLAEEATERIEKVSRERGGWLEHHHHHH (SEQ ID NO: 548) |
| DHR52 | MQCEDRKEKIRELERKARENTGSDEARQAVKEIARIAKEALEEGCCDTAKEAIQRLEDLARDYSGSDVASL |
| | AVKAIAKIAETALRNGCCDTAKEAIQRLEDLARDYSGSDVASLAVKAIAKIAETALRNGCKETAEEAIKRL |
| | RELAEDYKGSEVAKLAEEAIERIEKVSRERGGWLEHHHHHH (SEQ ID NO: 549) |
| DHR53 | MSNDEKEKLKELLKRAEELAKSPDPEDLKEAVRLAEEVVRERPGSNLAKKALEIILRAAEELAKLPDPEAL |
| | KEAVKAAEKWREQPGSNLAKKALEIILRAARRLAKLPDPEALKEAVKAAEKVVREQPGSELAKKALEIIE |
| | RAAEELKKSPDPEAQKEAKKAEQKVREERPGGWLEHHHHHH (SEQ ID NO: 550) |
| DHR54 | MTTEDERRELEKVARKAIEAAREGNTDEVREQLQRALEIARESGTTEAVKLALEVVARVAIEAARRGNTDA |
| | VREALEVALEIARESGTTEAVKLALEVVARVAIEAARRGNTDAVREALEVALEIARESGTEEAVRLALEVV |
| | KRVSDEAKKQGNEDAVKEAEEVRKKIEEESGGWLEHHHHHH (SEQ ID NO: 551) |
| DHR55 | MSSVAEETEKRAKKISKELKKEGKNPEWIEELQRAADKLVEVARRATSSDALEIAKRAVKIAEELAKQGSN |
| | PKWIAELLKAAAKLVEVAARATSSDALEIAKRAVKIAEELAKQGSNPKWIAELLKAAAKLVEVAARATSPK |
| | ALKQAKEAVKEAEELAKKGRNPKEIAEELKKRAKEVEKLARSTGWLEKHHHHH (SEQ ID NO: 552) |
| DHR56 | MSSVAEEIEKRCKKISKELKKEGKNPEWIEELQRACDKLVEVARRATSSDALEIAKRCVKIAEELAKQGSN |
| | PKWIAELLKACAKLVEVAARATSSDALEIAKRCVKIAEELAKQSNPKWIAELLKACAKLVEVAARATSPK |
| | ALKQAKECVKEAEELAKKGRNPKEIAEELKKCAKEVEKLARSTGWLEHHHHHH (SEQ ID NO: 553) |
| DHR57 | MSTEELKKVLERVRELSERAKESTDPEEALKIAKEVIELALKAVKEDPSTDALRAVLEAVRLASEVAKRVT |
| | DPDKALKIAKLVIELALEAVKEDPSTDALRAVLEAVRLASEVAKRVTDPDKALKIAKLVIELALEAVKEDP |
| | SEEAKRAVEEAKRLAEEVSKRVTDPELSEKIRQLVKELEEEAQKEDPGWLEKHHHHH (SEQ ID NO: |
| | 554) |
| DHR58 | MSTEELKKVLERVRELCERAKESTDPEEALKIAKEVIELALKAVKEDPSTDALRAVLEAVRCACEVAKRVT |
| | DPDKALKIAKLVIELALEAVKEDPSTDALRAVLEAVRCACEVAKRVTDPDKALKIAKLVIELALEAVKEDP |
| | SEEAKRAVEEAKRCAEEVSKRVTDPELSEKIROLVKELEEEAQKEDPGWLEHHHHHH (SEQ ID NO: |
| | 555) |
| DHR59 | MKTEVEKKAKEVIKEAKELAKELDSEEAKKVVERIKEAAEAAKRAAEQGKTEVAKLALKVLEEAIELAKEN |
| | RSEEALKVVLEIARAALAAAQAAEEGKTEVAKLALKVLEEAIELAKENRSEEALKVVLEIARAALAAAQAA |
| | EEGKSDEARDALRRLEEAIEEAKENRSKESLEKVREEAKEAQQAEDAREGGWLEHHHHHH (SEQ ID |
| | NO: 556) |
| DHR60 | MTDIKKKAEEIIKEAKKQGSEDAIRLAQEAKKQGTDILVRAAEIVVRAQEQGSEDAIRLAKEASREGTDIL |
| | VRAAEIVVRAQEQGSEDAIRLAKEASREGTPTLVKAAEKWRAQQKGSQDTTEKAKEESREGGWLEHHHHH |
| | H (SEQ ID NO: 557) |
| DHR61 | MTDIKKKAEEIIKEAKKQGSEDAIRLAQECKKQGTDICVRAAEIVVRAQEQGSEDAIRLAKECSREGTDIC |
| | VRAAETVVRAQEQGSEDAIRLAKECSREGTPTCVKAAEKVVRAQQKGSQDTIEKAKEESREGGWLEHHHHH |
| | H (SEQ ID NO: 558) |
| DHR62 | MDNDEKRKRAEKALQRAQEAEKKGDVEEAVRAAQEAVRAAKESGDNDVLRKVAEQALRIAKEAEKQGNVEV |
| | AVKAARVAVEAAKQAGDNDVLRKVAEQALRIAKEAEKQGNVEVAVKAARVAVEAAKQAGDQDVLRKVSEQA |
| | ERISKEAKKQGNSEVSEEARKVADEAKKQTGGWLEHHHHHH (SEQ ID NO: 559) |
| DHR63 | MDPDEDRERLKEELKKIREALREAKEKPDPEEIKRALREVLEAIRRILKLAERAGDPDLAREALKEINKVI |
| | REALETAKRVPDPEVIKEALRVVLEATRAILKLAEQAGDPDLAREALKEINKVTREALEIAKRVPDPEVTK |
| | EALRVVLEAIRAILKLAEQAGDPDLAREALEEIDKVIDEAQEISERVPDEEVQREAQEVIKEADRARKKLS |
| | EQSGGWLEHHHHHH (SEQ ID NO: 560) |
| DHR64 | MDPEDELKRVEKLVKEAEELLRQAKEKGSEEDLEKALRTAEEAAREAKKVLEQAEKEGDPEVALRAVELVV |
| | RVAELLLRIAKESGSEEALERALRVAEEAARLAKRVLELAEKQGDPEVALRAVELVVRVAELLLRIAKESG |
| | SEEALERALRVAEEAARLAKRVLELAEKQGDPEVARRAVELVKRVAELLERIARESGSEEAKERAERVREE |
| | ARELQERVKELREREGGWLEHHHHHH (SEQ ID NO: 561) |
| DHR65 | MDPEDELKRVEKLVKEAEELLRQCKEKGSEECLEKALRTAEEAAREAKKVLEQAEKEGDPEVALRAVELVV |
| | RVAELLLRICKESGSEECLERALRVAEEAARLAKRVLELAEKQGDPEVALRAVELVVRVAELLLRICKESG |
| | SEECLERALRVAEEAARLAKRVLELAEKQGDPEVARRAVELVKRVAELLERICRESGSEECKERAERVREE |
| | ARELQERVKELREREGGWLEHHHHHH (SEQ ID NO: 562) |
| DHR66 | MTSDDDKVREAEERVREAIERIQRALKKRDTPDARKALEAAKKLLKVVEKAKKRGTSDAIKVAEAAARVAE |
| | AIARILEALNERDTPDARKALRAAIKLAEVVYKAAESGTSDAIKVAEAAARVAEAIARILEALNERDTPDA |
| | RKALRAAIKLAEVVYKAAESGTTEALKVAEKAARVAEKIARILEKLNERDTPEARKKLRQAIKEAEKVYKE |
| | SEQGGWLEHHHHHH (SEQ ID NO: 563) |
| DHR67 | MTSEIDKLIKKLRQTAKEVKREAEERKRRSTDPTVREVIERLAQLALDVAEEAARLIKKATTSEVAKLVWK |
| | LARTAIEVIREAIERAERSTDPEVIRVILELARLAAEVAKEAARLIVKATTSEVAKLVWKLARTAIEVIRE |
| | AIERAERSTDPEVIRVILELARLAAEVAKEAARLIVKATTEEVAKKVWKEAYRAIEEIRKAIEKAERSTDP |
| | NEIKKILEEARKKAEEAISRAKEIVKSTGWLEHHHHHH (SEQ ID NO: 564) |
| DHR68 | MTPREPLEEAKERVEEIRELIDKARKLQEQGNKEEAEKVLREAREQIREVTRELEEIAKNSDTPELALRAA |
| | ELLVRLIKLLIEIAKLLQEQGNKEEAEKVLREATELIKRVTELLEKIAKNSDTPELALRAAELLVRLIKLL |
| | IEIAKLLQEQGNKEEAEKVLREATELIKRVTELLEKIAKNSDTPELAKRAAELLKRLIELLKEIAKLLEEE |
| | GNEDEAEKVKEEAKELEERVRELEERIRKNSDGWLEHHHHHH (SEQ ID NO: 565) |
| DHR69 | MNPQEDLERAEKVVRSVEEVLQRAKEAQREGDKEKVERLIKEAENQIRKARELLERVVRQNPDDPEVLLRV |
| | AELIVRLVEVVLELAKLAEKNGDKEQVERLIQTAEELIREARELLERVSREIPDNPEVLLRVAELIVRLVE |
| | VVLELAKLAEKNGDKEQVERLIQTAEELIREARELLERVSREIPDNPESLKRVAELIKRLVKVVDELSKLA |
| | ERNGDRDQVERLRQLAEELRREAEELEERVRRERPDGWLEHHHHHH (SEQ ID NO: 566) |
| DHR70 | MSTEEKIEEARQSIKEAERSLREGNPEKAREDVRRALELVRELEKLARKTGSTEVLIEAARLAIEVARVAL |
| | KVGSPETAREAVRTALELVQELERQARKTGSTEVLIEAARLAIEVARVALKVGSPETAREAVRTALELVQE |
| | LERQARKTGSDEVLKRAAELAKEVARVAKEVGSPETARQARETAERLREELRRNREKKGGWLEHHHHHH |
| | (SEQ ID NO: 567) |
| DHR71 | MDPEEILERAKESLERAREASERGDEEEFRKAAEKALELAKRLVEQAKKEGDPELVLEAAAKVALRVAELAA |
| | KNGDKEVFKKAAESALEVAKRLVEVASKEGDPELVLEAAKVALRVAELAAKNGDKEVFKKAAESALEVAKR |
| | LVEVASKEGDPELVEEAAKVAEEVRKLAKKQGDEEVYEKARETAREVKEELKRVREEKGGWLEHHHHHH |
| | (SEQ ID NO: 568) |
| DHR72 | MDSTKEKARQLAEEAKETAEKVGDPELIKLAEQASQEGDSEKAKAILLAAREAARVAKEVGDPELIKLALEA |
| | ARRGDSEKAKAILLAAEAARVAKEVGDPELIKLALEAARRGDSEKARAILEAAERAREAKERGDPEQIKKA |
| | RELAKRGGWLEHHHHHH (SEQ ID NO: 569) |
| DHR73 | MDAEEEAKEAIKRAQEAIELARKGNPEEARKVAEEARERAERVREEAEKRGDAEVLALVAIALALVAIALA |
| | EVGNPEEAREVAERAKEIAERVRELAEKRGDAEVLALVAIALALVAIALAEVGNPEEAREVAERAKEIAER |
| | VRELAEKRGDARVLKLVAKALELVAEALKKVGNPEEAREVEERAREIKERVRRLLEEKGGWLEHHHHHH |
| | (SEQ ID NO: 570) |
| DHR74 | MDSEADRIIKKLQKEIKEVEQEARDSNDDEERELLKRLAEALKRAAEAVKRAQESGDSEAIRIIKKLVKEI |
| | TEVVREARKSTDKEEIELLIRLAEALARAAEAVADAAKSGDSEAIRIIKKLVKEITEVVREARKSTDKEEI |
| | ELLIRLAEALARAAEAVADAAKSGDQEAIKRIKKLVKKIIEVVRKARKSTNKKEIEKLIRAEKLARKAEQ |
| | IAEDAKRGGWLEHHHHHH (SEQ ID NO: 571) |
| DHR75 | MDSEKEKATELAERAQDVASRVEEEARREGSRELIEIARELRERAEEASQEGDSEKAKAILLAAKAVLVAV |
| | EVYERAKRQGSDELREIARELAKEALRAAQEGDSEKAKAILLAAKAVLVAVEVYERAKRQGSDELREIARE |
| | LAKEALRAAQEGDSEKARAILEAAREVLRAVEQYERAKRRGDDDERERAREEAREALERAREGGWLEHHHH |
| | HH (SEQ ID NO: 572) |
| DHR76 | MNPELEEWIRRAKEVAKEVEKVAQRAEEEGNPDLRDSAKELRRAVEEAIEEAKKQGNPELVEWVARAAKVA |
| | AEVIKVAIQAEKEGNRDLFRAALELVRAVIEAIEEAVKQGNPELVEWVARAAKVAAEVIKVAIQAEKEGNR |
| | DLFRAALELVRAVIEAIEEAVKQGNPELVERVARLAKKAAELIKRAIRAEKEGNRDERREALERVREVIER |
| | IEELVRQGGWLEHHHHHH (SEQ ID NO: 573) |
| DHR77 | MNSDEEEAREWAERAEEAAKEALEQAKREGDEDARRVAEELEKQAEEARRKKDSEEAEAVYWAARAVLAAL |
| | EALEQAKREGDEDARRVAEELLRQAEEAARKKNSEEAEAVYWAARAVLAALEALEQAKREGDEDARRVAEE |
| | LLRQAEEAARKKNPEEARAVYEAARDVLEALQRLEEAKRRGDEEERREAEERLRQAEERARKKGWLEHHHH |
| | HH (SEQ ID NO: 574) |
| DHR78 | MNSDEEEAREWAERAEEAAKEALEQAKREGDEDARRCAEELEKQAEEARRKKDSEEAEAVYWAARAVLAAL |
| | EALEQAKREGDEDARRCAEELLRQACEAARKKNSEEAEAVYWAARAVLAALEALEQAKREGDEDARRCAEE |
| | LLRQACEAARKKNPEEARAVYEAARDVLEALQRLEEAKRRGDEEERREAEERLRQACERARKKGWLEHHHH |
| | HH (SEQ ID NO: 575) |
| DHR79 | MSSDEEEARELIERAKEAAERAQEAAERTGDPRVRELARELKRLAQEAAEEVKRDPSSSDVNEALKLIVEA |
| | IEAAVRALEAAERTGDPEVRELARELVRLAVEAAEEVQRNPSSSDVNEALKLIVEAIEAAVRALEAAERTG |
| | DPEVRELARELVRLAVEAAEEVQRNPSSEEVNEALKKIVKAIQEAVESLREAEESGDPEKREKARERVREA |
| | VERAEEVQRDPSGWLEHHHHHH (SEQ ID NO: 576) |
| DHR80 | MNSEELERESEEAERRLQEARKRSEEARERGDLKELAEALIEEARAVQEIARVASERGNSEEAERASEKAQ |
| | RVLEEARKVSEEAREQGDDEVLALALIAIALAVLALAEVASSRGNSEEAERASEKAQRVLEEARKVSEEAR |
| | EQGDDEVLALALIAIALAVLALAEVASSRGNKEEAERAYEDARRVEEEARKVKESAEEQGDSEVKRLAEEA |
| | EQLAREARRHVQETRGGWLEHHHHHH (SEQ ID NO: 577) |
| DHR81 | MNSEELERESEEAERRLQEARKRSEEAREFGDLKELAEALIEEARAVQELARVACERGNSEEAERASSKAQ |
| | RVLEEARKVSEEARECGDDEVLALALIAIALAVLALAEVACCRGNSEEAERASEKAQRVLEEARKVSEEAR |
| | EQGDDEVLALALIAIALAVLALAEVACCRGNKEEAERAYEDARRVEEEARVKESAEEQGDSEVKRLAEEA |
| | EQLAREARRHVQECRGGWLEHHHHHH (SEQ ID NO: 578) |
| DHR82 | MNDEEVQEAVERAEELREEAEELIKKARKTGDPELLRKALEALEEAVRAVEEAIKRNPDNDEAVETAVRLA |
| | RELKKVAEELQERAKKTGDPELLKLALRALEVAVRAVELAIKSNPDNDEAVETAVRLARELKKVAEELQER |
| | AKKTGDPELLKLALRALEVAVRAVELAIKSNPDNEEAVETAKRLAEELRKVAELLEERASETGDPELQELA |
| | KRAKEVADRARELAKKSNPNGWLEHHHHHH (SEQ ID NO: 579) |
| DHR83 | MNDEEVQEACERAEELIREEAEELIKKARKTGDPELLRKALEALEEAVRAVEEAIKRNPDNDECVETACRLA |
| | RELKKVAEELQERAKKTGDPELLKLALRALEVAVRAVELAIKSNPDNDECVETACRLARELKKVAEELQER |
| | AKKTGDPSLLKLALRALEVAVRAVSLAIKSNPDNEECVETAKRLAEELRKVAELLEERAKETGDPELQELA |
| | KRAKEVADRARELAKKSKPNGWLEHHHHHH (SEQ ID NO: 580) |

### Example Computing Environment

[0373] FIG. 8 is a block, diagram of an example computing network. Some or all of the above-mentioned techniques disclosed herein, such as but not limited to techniques disclosed as part of and/or being performed by software, the Rosetta software suite, RosettaDesign, Rosetta applications, and/or other herein-described computer software and computer hardware, can be part of and/or performed by a computing device. For example, FIG. 8. shows protein design system 802 configured to communicate, via network 806, with client devices 804a, 804b, and 804c and protein database 808. In some embodiments, protein design system 802 and/or protein database 808 can be a computing device configured to perform some or all of the herein described methods and techniques, such as but not limited to, method 1000 and functionality described as being part of or related to Rosetta. Protein database 808 can, in some embodiments, store information related to and/or used by Rosetta.

[0374] Network 806 may correspond to a LAN, a wide area network (WAN), a corporate intranet, the public Internet, or any other type of network configured to provide a communications path between networked computing devices. Network 806 may also correspond to a combination of one or more LANs, WANs, corporate intranets, and/or the public Internet. Although FIG. 8 only shows three client devices 804a, 804b, distributed application architectures may serve tens, hundreds, or thousands of client devices. Moreover, client devices 804a, 804b, 804c (or any additional client devices) may be any sort of computing device, such as an ordinary laptop computer, desktop computer, network terminal, wireless communication device a cell phone or smart phone), and so on. In some embodiments, client devices 804a, 804b, 804c can be dedicated to problem solving/using the Rosetta software suite. In other embodiments, client devices 804a, 804b, 804c can be used as general purpose computers that are configured to perform a number of tasks and need not be dedicated to problem solving/using Rosetta. In still other embodiments, part or all of the functionality of protein design system 802 and/or protein database 808 can be incorporated in a client device, such as client device 804a, 804b, and/or 804c.

### Computing Device Architecture

[0375] FIG. 9A is a block diagram of an example computing device (e.g., system) In particular, computing device 900 shown in FIG. 9A can be configured to: include components of and/or perform one or more functions of protein design system 802, client de vice 804a, 804b, 804c, network 806, and/or protein database 808 and/or carry out part Or all of any herein-described methods and techniques, such as but not limited to method 1000. Computing device 900 may include a user interface module 901, a network-communication interface module 902, one or more processors 903, and data storage 904, all of which may be linked together via a system bus network, or other connection mechanism 905. User interface module 901 can be operable to send data to and/or receive data from external user input/output devices. For example, user interface module 901 can be configured to send and/or receive data to and/or from user input devices such as a keyboard, a keypad, a touch, screen, a computer mousey a track ball, a joystick, a camera, a voice recognition module, and/or other similar devices; User interface module 901 can also be configured to provide output to user display devices, such as one or more cathode ray tubes (CRT), liquid crystal displays (LCD), light emitting diodes (LEDs), displays using digital light processing (DLP) technology, printers, light bulbs, and/or other similar devices, either now known or later developed. User interface module 901 can also be configured to generate audible output(s), such as a speaker, speaker jack, audio output port, audio output device, earphones, and/or other similar devices.

[0376] Network-communications interface module 902 can include one or more wireless interfaces 907 and/or one or more wireline interfaces 908 chat are configurable to communicate via a network, such as network 806 shown in FIG. 8. Wireless interfaces 907 can include one or more wireless transmitters, receivers, and/or transceivers, such as a Bluetooth transceiver, a Zigbee transceiver, a Wi-Fi transceiver, a WiMAX transceiver, and/or other similar type of wireless transceiver configurable to communicate via a wireless network. Wireline interfaces 908 can include one or more wireline transmitters, receivers, and/or transceivers, such as an Ethernet transceiver, a Universal Serial Bus (USB) transceiver, or similar transceiver configurable to communicate via a twisted pair, one or more wires, a coaxial cable, a fiber-optic link, or a similar physical connection to a wireline network.

[0377] In some embodiments, network communications interface module 902 can be configured to provide reliable, secured, and/or authenticated communications. For each communication described herein, information for ensuring reliable communications (i.e., guaranteed message delivery) can be provided, perhaps as part of a message header and/or footer (e.g., packet/message sequencing information, encapsulation header(s) and/or footer(s), size/time information, and transmission verification information such as CRC and/or parity check values). Communications can be made secure (e.g., be encoded or encrypted) and/or decrypted/decoded using one or more cryptographic protocols and/or algorithms, such as, but not limited to, DES, AES, RSA, Diffie-Hellman, and/or DSA. Other cryptographic protocols and/or algorithms can be used as well or in addition to those listed herein to secure (and then decrypt/decode) communications.

[0378] Processors 903 can include one or more general purpose processors and/or one or more special purpose processors (e.g., digital signal processors, application specific integrated, circuits, etc.). Processors 903 can be configured to execute computer-readable program instructions 906 contained in data storage 904 and/or other instructions as described herein. Data storage 904 can include one or more computer-readable storage media that can be read and/or accessed by at least one of processors 903. The one or more computer-readable storage media can include volatile and/or non-volatile storage components, such as optical, magnetic, organic or other memory or disc storage, which can be integrated in whole or in part with at least one of processors 903. In some embodiments, data storage 904 can be implemented using a single physical device (e.g., one optical, magnetic, organic or other memory or disc storage unit), while in other embodiments, data storage 904 can be implemented using two or more physical devices.

[0379] Data storage 904 can include computer-readable program instructions 906 and perhaps additional data. For example, in some embodiments, data storage 904 can store part or all of data utilized by a protein design system and/or a protein database; e.g., protein designs system 802, protein database 808. In some embodiments, data storage 904 can i additionally include storage required to perform at least part of the herein-described methods and techniques and/or at least part of the functionality of the herein-described devices and networks.

[0380] FIG. 9B depicts a network 806 of computing clusters 909a, 909b, 909c arranged as a cloud-based server system in accordance with an example embodiment. Data and/or software for protein design system 802 can be stored on one or more cloud-based devices that store program logic and/or data of cloud-based applications and/or services. In some embodiments, protein design system 802 can be a single computing device residing in a single computing center. In other embodiments, protein design system 802 can include multiple computing devices in a single computing center, or even multiple computing devices located in multiple computing centers located in diverse geographic locations.

[0381] In some embodiments, data and/or software for protein design system 802 can be encoded as computer readable information stored in tangible computer readable media (or computer readable storage media) and accessible by client devices 804a, 804b, and 804c, and/or other computing devices. In some embodiments, data and/or software for protein design system 802 can be stored on a single disk drive or other tangible storage media, or can be implemented on multiple disk drives or other tangible storage media located at one or more diverse geographic locations.

[0382] FIG. 9B depicts a cloud-based server system in accordance with, an example embodiment. In FIG. 9B, the functions of protein design system 802 can be distributed among three computing dusters 909a, 909b, and 909c. Computing cluster 909a can include one or more computing devices 900a, cluster storage arrays 910a, and cluster routers 911a connected by a local cluster network 912a. Similarly, computing cluster 909b can include one or more computing devices 900b, cluster storage arrays 910b, and cluster routers 911b connected by a local cluster network 912b. Likewise, computing cluster 909c can include one or more computing devices 900c, cluster storage arrays 910c, and cluster routers 911c connected by a local cluster network 912c.

[0383] In some embodiments, each of the computing clusters 909a. 909b, and 909c can have an equal number of computing devices, an equal number of cluster storage arrays, and an equal number of cluster routers. In other embodiments, however, each computing cluster can have different numbers of computing, devices, different numbers of cluster storage arrays, and different numbers of cluster routers. The number of computing devices, cluster storage arrays, and cluster routers in each computing cluster can depend on the computing task or tasks assigned to each computing cluster.

[0384] In computing cluster 909a, for example, computing devices 900a can be configured to perform various computing tasks of protein design system 802. In one embodiment, the various functionalities of protein design system 802 can be distributed among one or more of Computing devices 900a, 900b, and 900c. Computing devices 900b and 900c in computing clusters 909b and 909c can be configured similarly to computing devices 900a in computing cluster 909a. On the other hand, in some embodiments, computing devices 900a, 900b, and 900c can be configured to perform different functions.

[0385] In some embodiments, computing tasks and stored data associated with protein design system 802 can be distributed across computing devices 900a, 900b, and 900c based at least in part on the processing requirements of protein design system 802, the processing capabilities of computing devices 900a, 900b, and 900c, the latency of the network links between the computing devices in each computing cluster and between the computing clusters themselves, and/or other factors that can contribute to the cost, speed, fault-tolerance, resiliency, efficiency, and/or other design goals of the overall system, architecture.

[0386] The cluster storage arrays 910a, 910b, and 910c of the computing clusters 909a, 909b, and 909c can be data storage arrays that include disk array controller configured to manage read and write access to groups of hard disk drives. The disk array controllers, alone or in conjunction with their respective computing devices, can also be configured to manage backup or redundant copies of the data stored in the cluster storage arrays to protect against disk drive or other cluster storage array failures and/or network failures that prevent one or more computing devices from accessing one or more cluster storage arrays.

[0387] Similar to the manner in which the functions of protein design system 802 can be distributed across computing devices 900a, 900b, and 900c of computing clusters 909a, 909b, and 909c, various active portions and/or backup portions of these components can be distributed across cluster storage arrays 910a, 910b, and 910c. For example, some cluster storage arrays can be configured to store one portion of the data and/or software of protein design system 802, while other cluster storage arrays can store a separate portion of the data and/or software of protein design system 802. Additionally, some cluster storage arrays can be configured to store backup versions of data stored in other cluster storage arrays.

[0388] The cluster routers 911a, 911b, and 911c in computing clusters 909a, 909b, and 909c can include networking equipment configured to provide internal and external communications for the computing clusters. For example, the cluster routers 911a in computing cluster 909a can include one or more internet switching and routing devices configured to provide (i) local area network communications between the computing devices 900a and the cluster storage arrays 901a via the local cluster network 912a, and (ii) wide area network, communications between the computing cluster 909a and the computing clusters 909b and 909c via the wide area network connection 913a to network 806. Cluster routers 911b and 911c can include network equipment similar to the cluster routers 911a, and cluster routers 911b and 911c can perform similar networking functions for computing clusters 909b and 909b that cluster routers 911a perform for computing cluster 909a.

[0389] In some embodiments, the configuration, of the cluster routers 911a, 911b, and 911c can be based at least in part on the data communication requirements of the computing devices and cluster storage arrays, the data communications capabilities of the network equipment in the cluster routers 911a, 911b, and 911c, the-latency and throughput of local networks 912a, 912b, 912c, the latency, throughput, and cost of wide area network links 913a, 913b, and 913c, and/or other factors that can contribute to the cost, speed, fault-tolerance, resiliency, efficiency and/or other design goals of the moderation system architecture.

### Example Operations

[0390] FIG. 10 is a flow chart of an example method 1000. Method 1000 can begin at block 1010, where a computing device, such as computing device 900 described in the context of at least FIG. 9A, can determine a protein repeating unit, where the protein repeating unit can include one or more protein helices and one or more protein loops, such as discussed above at least in the context of the “Computational protocol” section. In some embodiments, the protein repeating unit can include two protein helices and two protein loops, such as discussed above at least in the contest of the “Computational protocol” section.

[0391] In other embodiments, determining the protein repeating unit can include: selecting one or more protein fragments, each protein fragment including a plurality of protein residues: and assembling the one or more protein fragments into at least part of the protein repeating unit, such as discussed above at least in the context of the “Computational protocol” section. In particular of these embodiments, assembling the one or more protein fragments into at least part of the protein repeating unit can include at least one of: assembling the one or more protein fragments into a helix of the protein repeating unit and assembling the one or more protein fragments into a loop of the protein repeating unit, such as discussed above at least in the context of the “Computational protocol” section. In other particular of these embodiments, the one or more protein fragments can include a particular protein fragment, where each protein residue of the plurality of protein residues for the particular protein fragment can be associated with a protein residue position; then, determining the protein repeating unit can further include: selecting a native protein fragment from among a plurality of native protein fragments, where the native protein fragment can include a plurality of native protein residues, and where each native protein residue of the plurality of native protein residues for the native protein fragment can be associated with a native protein residue position, determining whether each protein residue position associated with the plurality of particular residue positions is within a threshold distance of a native protein residue position associated with the plurality of native protein residues; and after determining that each protein residue position associated with the plurality of particular residue positions is within the threshold distance of a native protein residue position associated with the plurality of native protein residues, assembling the particular protein fragment into at least part of the protein repeating unit, such as discussed above at least in the context of the “Computational protocol” section.

[0392] At block 1020, the computing device can generate a protein backbone structure that includes at least one copy of the protein repeating unit, such as discussed above at least in the context of the “Computational protocol” section.

[0393] In some embodiments, generating the plurality of protein sequences based on the protein backbone structure can include generating the plurality of protein sequences based on the protein backbone structure such that an overall energy of the protein backbone structure is minimized, such as discussed above at least in the context of the “Computational protocol” section. In other embodiments, generating the plurality of protein sequences based on the protein backbone structure can includes generating the plurality of protein sequences based on the protein backbone structure such that a core packing of the protein backbone structure is increased, such as discussed above at least in the context of the “Computational protocol” section. In still other embodiments, generating the plurality of protein sequences based on the protein backbone structure can include generating the plurality of protein sequences so that one or more polar amino acids is introduced into the protein backbone structure such its discussed above at least in the context of the “Computational protocol” section. In even other embodiments, generating the plurality of protein sequences based on the protein backbone structure can include generating a protein sequence with one of more inter-repeat disulphide bonds, such as discussed above at least in the context of the “Computational protocol” section.

[0394] At block 1030, the computing device can determine whether a distance between a pair of helices of the protein backbone structure is between a lower distance threshold and an upper distance threshold, such as discussed above at least in the context of the “Computational protocol” section.

[0395] At block 1040, after determining that the distance between the pair of helices of the protein backbone structure is between the lower distance threshold and the upper distance threshold, the computing device can generate a plurality of protein sequences based on the protein backbone structure, select a particular protein sequence of the plurality of protein sequences based on an energy landscape for the particular protein sequence, where the energy landscape includes information about energy and distance from a target fold of the particular protein sequence, and generate an output based on the particular protein sequence, such as discussed above at least in the context of the “Computational protocol” section. In some embodiments, generating the output based on the particular protein sequence can include generating a display that includes at least part of the particular protein sequence; such as discussed above at least in the context of the “Computational protocol” section.

[0396] In some embodiments, method 1000 can further include: generating a synthetic gene encoding the particular protein sequence; expressing a particular protein in vivo using the synthetic gene; and purifying the particular protein, such as discussed above at least in the context of the “EXAMPLES” and “Protein expression and characterization” sections. In particular of these embodiments, expressing the particular protein sequence in vivo using the synthetic gene can include expressing the particular protein sequence in one or more Escherichia coli that include the synthetic gene, such as discussed above at least in the context of the “EXAMPLES” and “Protein expression and characterization” sections. In other particular of these embodiments, method 1000 can further include: purifying the particular protein via affinity chromatography, such as discussed above at least in the context of the “EXAMPLES” and “Protein expression and characterization” sections. In still other particular of these embodiments, method 1000 can further include: synthesizing a protein having the particular protein sequence, such as discussed above at least in the context of the “EXAMPLES” and “Protein expression and characterization” sections.

[0397] The particulars shown herein are fay way of example and for purposes of illustrative discussion of the preferred embodiments of the present invention only and are presented in the cause of providing what is believed to be the most useful and readily understood description of the principles and conceptual aspects of various embodiments of the invention. In this regard, no attempt is made to show structural details of the invention in more detail than is necessary for the fundamental understanding of the invention, the description taken with the drawings and/or examples making apparent to those skilled in the art how the several forms of the invention may be embodied in practice.

[0398] The above definitions and explanations are meant and intended to be controlling in any future construction unless clearly and unambiguously modified in the following examples or when application of the meaning renders any construction meaningless or essentially meaningless. In cases where the construction of the term would render it meaningless or essentially meaningless, the definition should be taken from Webster's Dictionary, Edition or a dictionary known to those of skill in the art, such as the Oxford Dictionary of Biochemistry and Molecular Biology (Ed. Anthony Smith, Oxford University Press, Oxford, 2004).

[0399] As used herein and. unless otherwise indicated, the terms “a” and “an” are taken to mean “one”, “at least one” or “one or more”. Unless otherwise required by context, singular terms used herein shall include pluralities and plural terms shall include the singular. Unless the context clearly requires otherwise, throughout the description and the claims, the words ‘comprise’, ‘comprising’, and the like are to be construed in an inclusive sense as opposed to an exclusive or exhaustive sense; that is to say, in the sense of “including, but not limited to”. Words using tire singular or plural number also include the plural or singular number, respectively. Additionally, the words “herein,” “above” and “below” and words of similar import, when used in this application, shall refer to this application as a whole and not to any particular portions of this application.

[0400] The above description provides specific details for a thorough understanding of, and enabling description for embodiments of the disclosure. However, one skilled in the art will understand that the disclosure may be practiced without these details. In other instances, well-known structures and functions have not been shown or described in detail to avoid unnecessarily obscuring the description of the embodiments of the disclosure. The description of embodiments of the disclosure is not intended to be exhaustive or to limit the disclosure to the precise form disclosed. While specific embodiments of, and examples for, the disclosure ate described herein for illustrative purposes, various equivalent modifications are possible within the scope of the disclosure, as those skilled in the relevant art will recognize.

[0401] All of the references cited herein are incorporated by reference. Aspects of the disclosure can be modified, if necessary, to employ the systems, functions and concepts of the above references and application to provide yet further embodiments of the disclosure. These and other changes can be made to the disclosure in light of the detailed description.

[0402] Specific elements of any of the foregoing embodiments can be combined, or substituted for elements in other embodiments. Furthermore, while advantages associated with certain embodiments of the disclosure have been, described in the context of these embodiments, other embodiments may also exhibit such advantages, and not all embodiments need necessarily exhibit such advantages to fall within the scope of the disclosure.

[0403] The above detailed description describes various features and functions of the disclosed, systems, devices, and methods with reference to the accompanying figures. In the figures, similar symbols typically identify similar components, unless context dictates otherwise. The illustrative embodiments described in the detailed description, figures, and claims are not meant to be limiting. Other embodiments can be utilized, and other changes can be made, without departing from the spirit or scope of the subject matter presented herein. It will be readily understood that the aspects of the present disclosure, as generally described herein, and illustrated in the figures, can be arranged, substituted, combined, separated, and designed in a wide variety of different configurations, all of which are explicitly contemplated herein.

[0404] With respect to any or all of the ladder diagrams, scenarios, and flowcharts in the figures and as discussed herein, each block and/or communication may represent a processing of information and/or a transmission of Information in accordance with example embodiments. Alternative embodiments are included within the scope of these example embodiments. In these alternative embodiments, for example, functions described as blocks, transmissions, communications, requests, responses, and/or messages may be executed out of order from that shown or discussed, including substantially concurrent or in reverse order, depending on the functionality involved, Further, more or fewer blocks and/or functions may be used with any of tire ladder diagrams, scenarios, and flow charts discussed, herein, and these ladder diagrams, scenarios, and flow charts may be combined with one another, in part or in whole.

[0405] A block that represents a processing of information may correspond to circuitry that can be configured to perform the specific logical functions of a herein-described method or technique. Alternatively or additionally, a block that represents a processing of information may correspond to a module, a segment, or a portion of program code (including related data). The program code may include one or more instructions executable by a processor for implementing specific logical functions or actions in the method or technique. The program code and/or related data may be stored on any type of computer readable medium such as a storage device including a disk or hard drive or other storage medium.

[0406] The computer readable medium may also include non-transitory computer readable media such as computer-readable media that stores data for short periods of time like register memory, processor cache, and random access memory (RAM). The computer readable media may also include non-transitory computer readable media that stores program code and/or data for longer periods of time, such as secondary or persistent long term storage, like read only memory (ROM), optical or magnetic disks, compact-disc read only memory (CD-ROM); for example. The computer readable media may also be any other volatile or non-volatile storage systems. A computer readable medium may be considered a computer readable storage medium, for example, or a tangible, storage device. Moreover, a block that represents one or move information transmissions may correspond to information transmissions between software and/or hardware modules in the same physical device. However, other information transmissions may be between software modules and/or hardware modules in different physical devices. Numerous modifications and variations of the present disclosure are possible in light of the above teachings.

### REFERENCES

[0407] 1. Kajava, A. V. Tandem repeats in proteins: From sequence to structure. J. Struct. Biol. 179, 279-288 (2012).
[0408] 2. Marcotte, E. M., Pellegrini, M., Yeates, T. O. & Eisenberg, D. A census of protein repeats1. J. Mol. Biol. 293, 151-160 (1999).
[0409] 3. Binz, H. K. et al. High-affinity binders selected from designed ankyrin repeat protein libraries, Nat. Biotechnol. 22, 575-582 (2004).
[0410] 4. Varadamsetty, G., Tremmel, D., Hansen. S., Parmeggiani, F. & Plückthun, A. Designed Armadillo Repeat Proteins: Library Generation, Characterization and Selection of Peptide Binders with High Specificity. J. Mol. Biol. 424, 68-87 (2012).
[0411] 5. Cortajarena, A. L., Liu, T. Y., Hochstrasser, M. & Regan L., Designed Proteins To Modulate Cellular Networks. ACS Chem. Biol. 5, 545-552 (2010).
[0412] 6. Kobe, B. & Kajava, A. V. When protein folding is simplified to protein coiling: the continuum of solenoid protein structures. Trends Biochem. Sci. 25, 509-515 (2000).
[0413] 7. Wetzel, S. K., Settanni, G., Kenig, M., Binz, H. K. & Plückthun, A Folding and Unfolding Mechanism of Highly Stable Full-Consensus Ankyrin Repeat Proteins. J. Mol. Biol. 376, 241-257 (2008).
[0414] 8. Cortajarena, A. L. & Regan, L. Calorimetric study of a series of designed repeat proteins: Modular structure and modular folding. Protein Sci. 20, 336-340 (2011).
[0415] 9. Binz, H. K., Stumpp, M. T., Forrer, P., Amstutz, P. & Plückthun, A. Designing Repeat Proteins: Well-expressed, Soluble and Stable Proteins from Combinatorial Libraries of Consensus Ankyrin Repeat Proteins. J. Mol. Biol. 332, 489-503 (2003).
[0416] 10. Mosavi, L. K., Minor, D. L. & Peng, Z. Consensus-derived structural determinants of the ankyrin repeat motif. Proc. Natl. Acad. Sci. 99, 16029-16034 (2002).
[0417] 11. Main, E. R. G., Xiong, Y., Cocco, M. J., D'Andrea, L. & Regan, L. Design of Stable α-Helical. Arrays from an Idealized TPR Motif. Structure 11, 497-508 (2003).
[0418] 12. Urvoas, A. et al. Design, Production and Molecular Structure of a New Family of Artificial Alpha-helicoidal Repeat Proteins (αRep) Based on Thermostable HEAT-like Repeats. J. Mol. Biol. 404, 307-327 (2010).
[0419] 13. Lee, S.-C. et al. Design of a binding scaffold based on variable lymphocyte receptors of jawless vertebrates by module engineering, Proc. Natl. Acad. Sci. 109, 3299-3304 (2012).
[0420] 14. Parmeggiani, F. et al. Designed Armadillo Repeat Proteins as General Peptide-Binding Scaffolds: Consensus Design and Computational Optimization of the Hydrophobic Core. J. Mol. Biol. 376, 1282-1304 (2008).
[0421] 15. Yadid, I. & Tawfik, D. S. Reconstruction of Functional β-Propeller Lectins via Homo-oligomeric Assembly of Shorter Fragments. J. Mol. Biol. 365, 10-17 (2007).
[0422] 16. Coquille, S. et al. An artificial PPR scaffold for programmable RNA recognition Nat. Commun. 5, (2014).
[0423] 17. Rämisch, S. Weininger, U., Martinsson, J., Akke, M. & André, I. Computational design of a leucine-rich repeat protein with a predefined geometry, Proc. Natl. Acad. Sci. 111, 17875-17880 (2014).
[0424] 18. Lee, J. & Blaber, M. Experimental support for the evolution of symmetric protein architecture from a simple peptide motif. Proc. Natl. Acad. Sci. 108, 126-130 (2011).
[0425] 19. Voet, A. R. D. et al. Computational design of a self-assembling symmetrical β-propeller protein. Proc. Natl. Acad. Sci. 111, 15102-15107 (2014).
[0426] 20. Parmeggiani, F. et al. A General Computational Approach for Repeat Protein Design. J. Mol. Biol. 427, 563-575 (2015).
[0427] 21. Tripp, K. W. & Barrick, D. Enhancing the Stability and Folding Rate of a Repeat Protein through the Addition of Consensus Repeats. J. Mol. Biol. 365, 1187-1200 (2007).
[0428] 22. Park, K. et al. Control of repeat-protein curvature by computational protein design. Nat. Struct. Mol. Biol. 22, 167-174 (2015).
[0429] 23. Huang, P.-S. et al. RosettaRemodel; A Generalized Framework for Flexible Backbone Protein Design. PLoS ONE 6, e24109 (2011).
[0430] 24. Leaver-Fay, A. et al. ROSETTA3: an object-oriented software suite for the simulation and design of macromolecules. Methods Enzymol. 487, 545-574 (2011).
[0431] 25. Huang, P.-S. et al. High thermodynamic stability of parametrically designed helical bundles. Science 346, 481-485 (2014).
[0432] 26. Bradley, P., Misura, K. M. S. & Baker, D. Toward High-Resolution de Novo Structure Prediction for Small Proteins. Science 309, 1868-1871 (2005).
[0433] 27. Rambo, R. P. & Tainer, J. A. Super-Resolution in Solution X-Ray Scattering and Its Applications to Structural Systems Biology. Annu. Rev. Biophys. 42, 415-441 (2013).
[0434] 28. Hura, G. L. et al. Robust, high-throughput solution structural analyses by small angle X-ray scattering (SAXS). Nat. Methods 6, 606-612 (2009).
[0435] 29. Hura, G. L. et al. Comprehensive macromolecular conformations mapped by quantitative SAXS analyses. Nat. Methods 10, 453-454 (2013).
[0436] 30. Altschul, S. F, et al. Gapped BLAST and PSI-BLAST: a new generation of protein database search programs. Nucleic Acids Res. 25, 3389-3402 (1997).
[0437] 31. Camacho, C. et al. BLAST: architecture and applications. BMC Bioinformatics 10, 421 (2009).
[0438] 32. Remmert, M., Biegert, A., Hauser; A. & Söding, J. HHblits: lightning-fast iterative protein sequence searching by HMM-HMM alignment. Nat. Methods 9, 173-175 (2012).
[0439] 33. Punta, M. et al. The Pfam protein families database. Nucleic Acids Rev. 40, D290-D301 (2012).
[0440] 34. Waterhouse, A. M., Procter, J. B., Martin, D. M. A., Clamp, M. & Barton, G. I. Jalview Version 2—a multiple sequence alignment editor and analysis workbench. Bioinformatics 25, 1189-1191 (2009).
[0441] 35. Zhang, Y. & Skolnick, J. TM-align; a protein structure alignment algorithm based on the TM-score. Nucleic Acids Res. 33, 2302-2309 (2005).
[0442] 36. Di Domenico, T. et al. RepeatsDB: a database of tandem repeat protein structures: Nucleic Acids Res. 42, D352-D357 (2014).
[0443] 37. Kabsch, W. XDS; Acta Crystallogr. Sect. D 66, 125-132 (2010).
[0444] 38. Adams, P. D. et al. PHENIX: building new software for automated crystallographic structure determination. Acta Crystallogr. Sect. D 58, 1948-1954. (2002).
[0445] 39. Emsley, P. & Cowtan, K. Coot: model-building tools for molecular graphics. Acta Crystallogr. D Biol Crystallogr. 60, 2126-2132 (2004).
[0446] 40. Chen, V. B. et al. MolProbity: all-atom structure validation for macromolecular crystallography. Acta Crystallogr. Sect. D 66, 12-21 (2010).
[0447] 41, Classen, S. et al. Implementation and performance of SIBYLS; a dual endstation small-angle X-ray scattering and macromolecular crystallography beamline at the Advanced Light Source. J. Appl. Crystallagr. 46, 1-13 (2013).
[0448] 42. Classen, S. et al. Software for the high-throughput collection of SAXS data using an enhanced Blu-Ice/DCS control system. J. Synchrotron Radiat. 17, 774-781 (2010).
[0449] 43. Schneidman-Duhovny, D., Hammel, M., Tainer; J. A. & Sali, A. Accurate SAXS Profile Computation and its Assessment Contrast Variation Experiments. biophys. J, 105, 962-974 (2013).
[0450] 44. Schneidman-Duhovny, D., Hammel, M. & Sali, A. FoXS: a web server for rapid computation and fitting of SAXS profiles. Nucleic Acids Res. 38, W540-W544 (2010).
[0451] 45. Svergun, D., Barberato, C. & Koch, M. H, J. CRYSOL—a Program to Evaluate X-ray Solution Scattering of Biological Macromolecules from Atomic Coordinates. J. Appl. Crystallogr. 29, 768-773 (1995).
[0452] 46: Petoukhov, M. V. et al. New developments in the ATSAS program package for small-angle scattering data analysis. J. Appl. Crystallogr. 45, 342-350 (2012).

1. A method, comprising:
determining a protein repeating unit using a computing device, wherein the protein repeating unit comprises one or more protein helices and one or more protein loops;
generating a protein backbone structure that comprises at least one copy of the protein repeating unit using the computing device;
determining whether a distance between a pair of helices of the protein backbone structure is between a lower distance threshold and an upper distance threshold using the computing device; and
after determining that the distance between the pair of helices of the protein backbone structure is between the lower distance threshold and the upper distance threshold, using the computing device for:
generating a plurality of protein sequences based on the protein backbone structure,
selecting a particular protein sequence of the plurality of protein sequences based on an energy landscape for the particular protein sequence, wherein the energy landscape comprises information about energy and distance from a target fold of the particular protein sequence, and
generating an output based on the particular protein sequence.

2. The method of claim 1, wherein the protein repeating unit comprises two protein helices and two protein loops.

3. The method of claim 1, wherein determining the protein repeating unit comprises:
selecting one or more protein fragments, each protein fragment comprising a plurality of protein residues; and
assembling the one or more protein fragments into at least part of the protein repeating unit.

4. The method of claim 3, wherein assembling the one or more protein fragments into at least part of the protein repeating unit comprises at least one of: assembling the one or more protein fragments into a helix of the protein repeating unit and assembling the one or more protein fragments into a loop of the protein repeating unit.

5. The method of claim 3, wherein the one or more protein fragments comprise a particular protein fragment, wherein each protein residue of the plurality of protein residues for the particular protein fragment is associated with a protein residue position, and wherein determining the protein repeating unit further comprises:
selecting a native protein fragment from among a plurality of native protein fragments, wherein the native protein fragment comprises a plurality of native protein residues, and wherein each native protein residue of the plurality of native protein residues for the native protein fragment is associated with a native protein residue position;
determining whether each protein residue position associated with the plurality of particular residue positions is within a threshold distance of a native protein residue position associated with the plurality of native protein residues; and
after determining that each protein residue position associated with the plurality of particular residue positions is within the threshold distance of a native protein residue position associated with the plurality of native protein residues, assembling the particular protein fragment into at least part of the protein repeating unit.

6. The method of any claim 1, wherein generating the plurality of protein sequences based on the protein backbone structure comprises:
generating the plurality of protein sequences based on the protein backbone structure such that an overall energy of the protein backbone structure is minimized.

7.-14. (canceled)

15. A computing device, comprising:
one or more data processors; and
a computer-readable medium, configured to store at least computer-readable instructions that, when executed, cause the computing device to perform the method of claim 1.

16. (canceled)

17 A non-transitory computer-readable medium, configured to store at least computer-readable instructions that, when executed by one or more processors of a computing device, cause the computing device to perform the method of claim 1.

18. (canceled)

19. A polypeptide comprising the amino acid sequence selected from the group consisting of:
(a) SEQ ID NO:1-[SEQ ID NO:2]_{(0 or 2-19)}-SEQ ID NO:3;
(b) SEQ ID NO:7-[SEQ ID NO:8]_{(0 or 2-19)}-SEQ ID NO:9;
(c) SEQ ID NO:13-[SEQ ID NO:14]_{(0 or 2-19)}-SEQ ID NO:15;
(d) SEQ ID NO:19-[SEQ ID NO:20]_{(0 or 2-19)}-SEQ ID NO:21;
(e) SEQ ID NO:25-[SEQ ID NO:26]_{(0 or 2-19)}-SEQ ID NO:27;
(f) SEQ ID NO:31-[SEQ ID NO:32]_{(0 or 2-19)}-SEQ ID NO:33;
(g) SEQ ID NO:37-[SEQ ID NO:38]_{(0 or 2-19)}-SEQ ID NO:39;
(h) SEQ ID NO:43-[SEQ ID NO:44]_{(0 or 2-19)}-SEQ ID NO:45;
(i) SEQ ID NO:49-[SEQ ID NO:50]_{(0 or 2-19)}-SEQ ID NO:51;
(j) SEQ ID NO:55-[SEQ ID NO:56]_{(0 or 2-19)}-SEQ ID NO:57;
(k) SEQ ID NO:61-[SEQ ID NO:62]_{(0 or 2-19)}-SEQ ID NO:63;
(l) SEQ ID NO:67-[SEQ ID NO:68]_{(0 or 2-19)}-SEQ ID NO:69;
(m) SEQ ID NO:73-[SEQ ID NO:74]_{(0 or 2-19)}-SEQ ID NO:75;
(n) SEQ ID NO:79-[SEQ ID NO:80]_{(0 or 2-19)}-SEQ ID NO:81;
(o) SEQ ID NO:85-[SEQ ID NO:86]_{(0 or 2-19)}-SEQ ID NO:87;
(p) SEQ ID NO:91-[SEQ ID NO:92]_{(0 or 2-19)}-SEQ ID NO:93;
(q) SEQ ID NO:97-[SEQ ID NO:98]_{(0 or 2-19)}-SEQ ID NO:99;
(r) SEQ ID NO:103-[SEQ ID NO:104]_{(0 or 2-19)}-SEQ ID NO:105;
(s) SEQ ID NO:109-[SEQ ID NO:110]_{(0 or 2-19)}-SEQ ID NO:111;
(t) SEQ ID NO:115-[SEQ ID NO:116]_{(0 or 2-19)}-SEQ ID NO:117;
(u) SEQ ID NO:121-[SEQ ID NO:122]_{(0 or 2-19)}-SEQ ID NO:123;
(v) SEQ ID NO:127-[SEQ ID NO:128]_{(0 or 2-19)}-SEQ ID NO:129;
(w) SEQ ID NO:133-[SEQ ID NO:134]_{(0 or 2-19)}-SEQ ID NO:135;
(x) SEQ ID NO:139-[SEQ ID NO:140]_{(0 or 2-19)}-SEQ ID NO:141;
(y) SEQ ID NO:145-[SEQ ID NO:146]_{(0 or 2-19)}-SEQ ID NO:147;
(z) SEQ ID NO:151-[SEQ ID NO:152]_{(0 or 2-19)}-SEQ ID NO:153;
(aa) SEQ ID NO:157-[SEQ ID NO:158]_{(0 or 2-19)}-SEQ ID NO:159;
(bb) SEQ ID NO:163-[SEQ ID NO:164]_{(0 or 2-19)}-SEQ ID NO:165;
(cc) SEQ ID NO:169-[SEQ ID NO:170]_{(0 or 2-19)}-SEQ ID NO:171;
(dd) SEQ ID NO:175-[SEQ ID NO:176]_{(0 or 2-19)}-SEQ ID NO:177;
(ee) SEQ ID NO:181-[SEQ ID NO:182]_{(0 or 2-19)}-SEQ ID NO:183;
(ff) SEQ ID NO:187-[SEQ ID NO:188]_{(0 or 2-19)}-SEQ ID NO:189;
(gg) SEQ ID NO:193-[SEQ ID NO:194]_{(0 or 2-19)}-SEQ ID NO:195;
(hh) SEQ ID NO:199-[SEQ ID NO:200]_{(0 or 2-19)}-SEQ ID NO:201;
(ii) SEQ ID NO:205-[SEQ ID NO:206]_{(0 or 2-19)}-SEQ ID NO:207;
(jj) SEQ ID NO:211-[SEQ ID NO:212]_{(0 or 2-19)}-SEQ ID NO:213;
(kk) SEQ ID NO:217-[SEQ ID NO:218]_{(0 or 2-19)}-SEQ ID NO:219;
(ll) SEQ ID NO:223-[SEQ ID NO:224]_{(0 or 2-19)}-SEQ ID NO:225;
(mm) SEQ ID NO:229-[SEQ ID NO:230]_{(0 or 2-19)}-SEQ ID NO:231;
(nn) SEQ ID NO:235-[SEQ ID NO:236]_{(0 or 2-19)}-SEQ ID NO:237;
(oo) SEQ ID NO:241-[SEQ ID NO:242]_{(0 or 2-19)}-SEQ ID NO:243;
(pp) SEQ ID NO:247-[SEQ ID NO:248]_{(0 or 2-19)}-SEQ ID NO:249;
(qq) SEQ ID NO:253-[SEQ ID NO:254]_{(0 or 2-19)}-SEQ ID NO:255;
(rr) SEQ ID NO:259-[SEQ ID NO:260]_{(0 or 2-19)}-SEQ ID NO:261;
(ss) SEQ ID NO:265-[SEQ ID NO:266]_{(0 or 2-19)}-SEQ ID NO:267;
(tt) SEQ ID NO:271-[SEQ ID NO:272]_{(0 or 2-19)}-SEQ ID NO:273;
(uu) SEQ ID NO:277-[SEQ ID NO:278]_{(0 or 2-19)}-SEQ ID NO:278;
(vv) SEQ ID NO:283-[SEQ ID NO:284]_{(0 or 2-19)}-SEQ ID NO:285;
(ww) SEQ ID NO:289-[SEQ ID NO:290]_{(0 or 2-19)}-SEQ ID NO:291;
(xx) SEQ ID NO:295-[SEQ ID NO:296]_{(0 or 2-19)}-SEQ ID NO:297;
(yy) SEQ ID NO:301-[SEQ ID NO:302]_{(0 or 2-19)}-SEQ ID NO:303;
(zz) SEQ ID NO:307-[SEQ ID NO:308]_{(0 or 2-19)}-SEQ ID NO:309;
(aaa) SEQ ID NO:313-[SEQ ID NO:314]_{(0 or 2-19)}-SEQ ID NO:315;
(bbb) SEQ ID NO:319-[SEQ ID NO:320]_{(0 or 2-19)}-SEQ ID NO:321;
(ccc) SEQ ID NO:325-[SEQ ID NO:326]_{(0 or 2-19)}-SEQ ID NO:327;
(ddd) SEQ ID NO:331-[SEQ ID NO:332]_{(0 or 2-19)}-SEQ ID NO:333;
(eee) SEQ ID NO:337-[SEQ ID NO:338]_{(0 or 2-19)}-SEQ ID NO:339;
(fff) SEQ ID NO:343-[SEQ ID NO:344]_{(0 or 2-19)}-SEQ ID NO:345;
(ggg) SEQ ID NO:349-[SEQ ID NO:350]_{(0 or 2-19)}-SEQ ID NO:351;
(hhh) SEQ ID NO:355-[SEQ ID NO:356]_{(0 or 2-19)}-SEQ ID NO:357;
(iii) SEQ ID NO:361-[SEQ ID NO:362]_{(0 or 2-19)}-SEQ ID NO:363;
(jjj) SEQ ID NO:367-[SEQ ID NO:368]_{(0 or 2-19)}-SEQ ID NO:369;
(kkk) SEQ ID NO:373-[SEQ ID NO:374]_{(0 or 2-19)}-SEQ ID NO:375;
(lll) SEQ ID NO:379-[SEQ ID NO:380]_{(0 or 2-19)}-SEQ ID NO:381;
(mmm) SEQ ID NO:385-[SEQ ID NO:386]_{(0 or 2-19)}-SEQ ID NO:387;
(nnn) SEQ ID NO:391-[SEQ ID NO:392]_{(0 or 2-19)}-SEQ ID NO:393;
(ooo) SEQ ID NO:397-[SEQ ID NO:398]_{(0 or 2-19)}-SEQ ID NO:399;
(ppp) SEQ ID NO:403-[SEQ ID NO:404]_{(0 or 2-19)}-SEQ ID NO:405; and
(qqq) SEQ ID NO:409-[SEQ ID NO:410]_{(0 or 2-19)}-SEQ ID NO:411;
wherein the domain in brackets is an optional internal domain.

20. The polypeptide of claim 19, wherein the polypeptide comprises or consists of the amino acid sequence selected from the group consisting of:
(A) SEQ ID NO:4-[SEQ ID NO:5]_{(0 or 2-19)}-SEQ ID NO:6;
(B) SEQ ID NO:10-[SEQ ID NO:11]_{(0 or 2-19)}-SEQ ID NO:12;
(C) SEQ ID NO:16-[SEQ ID NO:17]_{(0 or 2-19)}-SEQ ID NO:18;
(D) SEQ ID NO:22-[SEQ ID NO:23]_{(0 or 2-19)}-SEQ ID NO:24;
(E) SEQ ID NO:28-[SEQ ID NO:29]_{(0 or 2-19)}-SEQ ID NO:30;
(F) SEQ ID NO:34-[SEQ ID NO:35]_{(0 or 2-19)}-SEQ ID NO:36;
(G) SEQ ID NO:40-[SEQ ID NO:41]_{(0 or 2-19)}-SEQ ID NO:42;
(H) SEQ ID NO:46-[SEQ ID NO:47]_{(0 or 2-19)}-SEQ ID NO:48;
1(I) SEQ ID NO:52-[SEQ ID NO:53]_{(0 or 2-19)}-SEQ ID NO:54;
(J) SEQ ID NO:58-[SEQ ID NO:59]_{(0 or 2-19)}-SEQ ID NO:60;
(K) SEQ ID NO:64-[SEQ ID NO:65]_{(0 or 2-19)}-SEQ ID NO:66;
(L) SEQ ID NO:70-[SEQ ID NO:71]_{(0 or 2-19)}-SEQ ID NO:72;
(M) SEQ ID NO:76-[SEQ ID NO:77]_{(0 or 2-19)}-SEQ ID NO:78;
(N) SEQ ID NO:82-[SEQ ID NO:83]_{(0 or 2-19)}-SEQ ID NO:84;
(O) SEQ ID NO:88-[SEQ ID NO:89]_{(0 or 2-19)}-SEQ ID NO:90;
(P) SEQ ID NO:94-[SEQ ID NO:95]_{(0 or 2-19)}-SEQ ID NO:96;
(Q) SEQ ID NO:100-[SEQ ID NO:101]_{(0 or 2-19)}-SEQ ID NO:102;
(R) SEQ ID NO:106-[SEQ ID NO:107]_{(0 or 2-19)}-SEQ ID NO:108;
(S) SEQ ID NO:112-[SEQ ID NO:113]_{(0 or 2-19)}-SEQ ID NO:114;
(T) SEQ ID NO:118-[SEQ ID NO:119]_{(0 or 2-19)}-SEQ ID NO:120;
(U) SEQ ID NO:124-[SEQ ID NO:125]_{(0 or 2-19)}-SEQ ID NO:126;
(V) SEQ ID NO:130-[SEQ ID NO:131]_{(0 or 2-19)}-SEQ ID NO:132;
(W) SEQ ID NO:136-[SEQ ID NO:137]_{(0 or 2-19)}-SEQ ID NO:138;
(X) SEQ ID NO:142-[SEQ ID NO:143]_{(0 or 2-19)}-SEQ ID NO:144;
(Y) SEQ ID NO:148-[SEQ ID NO:149]_{(0 or 2-19)}-SEQ ID NO:150;
(Z) SEQ ID NO:154-[SEQ ID NO:155]_{(0 or 2-19)}-SEQ ID NO:156;
(AA) SEQ ID NO:160-[SEQ ID NO:161]_{(0 or 2-19)}-SEQ ID NO:162;
(BB) SEQ ID NO:166-[SEQ ID NO:167]_{(0 or 2-19)}-SEQ ID NO:168;
(CC) SEQ ID NO:172-[SEQ ID NO:173]_{(0 or 2-19)}-SEQ ID NO:174;
(DD) SEQ ID NO:178-[SEQ ID NO:179]_{(0 or 2-19)}-SEQ ID NO:180;
(EE) SEQ ID NO:184-[SEQ ID NO:185]_{(0 or 2-19)}-SEQ ID NO:186;
(FF) SEQ ID NO:190-[SEQ ID NO:191]_{(0 or 2-19)}-SEQ ID NO:192;
(GG) SEQ ID NO:196-[SEQ ID NO:197]_{(0 or 2-19)}-SEQ ID NO:198;
(HH) SEQ ID NO:202-[SEQ ID NO:203]_{(0 or 2-19)}-SEQ ID NO:204;
(II) SEQ ID NO:208-[SEQ ID NO:209]_{(0 or 2-19)}-SEQ ID NO:210;
(JJ) SEQ ID NO:214-[SEQ ID NO:215]_{(0 or 2-19)}-SEQ ID NO:216;
(KK) SEQ ID NO:220-[SEQ ID NO:221]_{(0 or 2-19)}-SEQ ID NO:222;
(LL) SEQ ID NO:226-[SEQ ID NO:227]_{(0 or 2-19)}-SEQ ID NO:228;
(MM) SEQ ID NO:232-[SEQ ID NO:233]_{(0 or 2-19)}-SEQ ID NO:234;
(NN) SEQ ID NO:238-[SEQ ID NO:239]_{(0 or 2-19)}-SEQ ID NO:240;
(OO) SEQ ID NO:244-[SEQ ID NO:245]_{(0 or 2-19)}-SEQ ID NO:246;
(PP) SEQ ID NO:250-[SEQ ID NO:251]_{(0 or 2-19)}-SEQ ID NO:252;
(QQ) SEQ ID NO:256-[SEQ ID NO:257]_{(0 or 2-19)}-SEQ ID NO:258;
(RR) SEQ ID NO:262-[SEQ ID NO:263]_{(0 or 2-19)}-SEQ ID NO:264;
(SS) SEQ ID NO:268-[SEQ ID NO:269]_{(0 or 2-19)}-SEQ ID NO:270;
(TT) SEQ ID NO:274-[SEQ ID NO:275]_{(0 or 2-19)}-SEQ ID NO:276;
(UU) SEQ ID NO:280-[SEQ ID NO:281]_{(0 or 2-19)}-SEQ ID NO:282;
(VV) SEQ ID NO:286-[SEQ ID NO:287]_{(0 or 2-19)}-SEQ ID NO:288;
(WW) SEQ ID NO:292-[SEQ ID NO:293]_{(0 or 2-19)}-SEQ ID NO:294;
(XX) SEQ ID NO:298-[SEQ ID NO:299]_{(0 or 2-19)}-SEQ ID NO:300;
(YY) SEQ ID NO:304-[SEQ ID NO:305]_{(0 or 2-19)}-SEQ ID NO:306;
(ZZ) SEQ ID NO:310-[SEQ ID NO:311]_{(0 or 2-19)}-SEQ ID NO:312;
(AAA) SEQ ID NO:316-[SEQ ID NO:317]_{(0 or 2-19)}-SEQ ID NO:318;
(BBB) SEQ ID NO:322-[SEQ ID NO:323]_{(0 or 2-19)}-SEQ ID NO:324;
(CCC) SEQ ID NO:328-[SEQ ID NO:329]_{(0 or 2-19)}-SEQ ID NO:330;
(DDD) SEQ ID NO:334-[SEQ ID NO:335]_{(0 or 2-19)}-SEQ ID NO:336;
(EEE) SEQ ID NO:340-[SEQ ID NO:341]_{(0 or 2-19)}-SEQ ID NO:342;
(FFF) SEQ ID NO:346-[SEQ ID NO:347]_{(0 or 2-19)}-SEQ ID NO:348;
(GGG) SEQ ID NO:352-[SEQ ID NO:353]_{(0 or 2-19)}-SEQ ID NO:354;
(HHH) SEQ ID NO:358-[SEQ ID NO:359]_{(0 or 2-19)}-SEQ ID NO:360;
(III) SEQ ID NO:364-[SEQ ID NO:365]_{(0 or 2-19)}-SEQ ID NO:366;
(JJJ) SEQ ID NO:370-[SEQ ID NO:371]_{(0 or 2-19)}-SEQ ID NO:372;
(KKK) SEQ ID NO:376-[SEQ ID NO:377]_{(0 or 2-19)}-SEQ ID NO:378;
(LLL) SEQ ID NO:382-[SEQ ID NO:383]_{(0 or 2-19)}-SEQ ID NO:384;
(MMM) SEQ ID NO:388-[SEQ ID NO:389]_{(0 or 2-19)}-SEQ ID NO:390;
(NNN) SEQ ID NO:394-[SEQ ID NO:395]_{(0 or 2-19)}-SEQ ID NO:396;
(OOO) SEQ ID NO:400-[SEQ ID NO:401]_{(0 or 2-19)}-SEQ ID NO:402;
(PPP) SEQ ID NO:406-[SEQ ID NO:407]_{(0 or 2-19)}-SEQ ID NO:408; and
(QQQ) SEQ ID NO:412-[SEQ ID NO:413]_{(0 or 2-19)}-SEQ ID NO:414;
wherein the domain in brackets is an optional internal domain.

21. The polypeptide of claim 19, wherein the optional internal domain is absent.

22. The polypeptide of claim 19, wherein the optional internal domain is present in 2-19 copies.

23. The polypeptide of claim 19, wherein the optional internal domain is is-present in 2-3 copies.

24. A polypeptide comprising or consisting of a polypeptide having at least 50% identity over its length with the amino acid sequence selected from the group consisting of SEQ ID NO: 415-497.

25. The polypeptide of claim 24, comprising or consisting of a polypeptide having at least 75% identity over its length with the amino acid sequence selected from the group consisting of SEQ ID NO: 415-497.

26. The polypeptide of claim 24, comprising or consisting of a polypeptide having at least 90% identity over its length with the amino acid sequence selected from the group consisting of SEQ ID NO: 415-497.

27. The polypeptide of claim 24, comprising or consisting of the amino acid sequence selected from the group consisting of SEQ ID NO: 415-497.

28. A protein assembly comprising a plurality of polypeptides having the same amino acid sequence selected from the group listed in claim 19.

29. A recombinant nucleic acid encoding a polypeptide of claim 19.

30. A recombinant expression vector comprising the nucleic acid of claim 29 operatively linked to a promoter.

31. A recombinant host cell comprising the recombinant expression vectors of claim 30.

The application's sequence listing, which the Patent Office published only in electronic form, follows.

SEQUENCE LISTING (588 sequences)

SEQ ID NO: 1 - protein, 45 aa, Artificial Sequence
  Synthetic
  MISC_FEATURE (1)..(1): X is G, S, D, or N
  MISC_FEATURE (2)..(2): X is C, S, D, or T
  MISC_FEATURE (3)..(3): X is D or E
  MISC_FEATURE (4)..(4): X is Q, D or E
  MISC_FEATURE (5)..(5): X is V, I, E or T
  MISC_FEATURE (7)..(7): X is K, R or E
  MISC_FEATURE (8)..(8): X is D, K, R or E
  MISC_FEATURE (10)..(10): X is S, A, Y or R
  MISC_FEATURE (11)..(11): X is S, K, E or D
  MISC_FEATURE (12)..(12): X is T, R, E or D
  MISC_FEATURE (13)..(13): X is I or V
  MISC_FEATURE (14)..(14): X is R, K or E
  MISC_FEATURE (15)..(15): X is E, N, Q or R
  MISC_FEATURE (16)..(16): X is V or A
  MISC_FEATURE (17)..(17): X is I, L or A
  MISC_FEATURE (18)..(18): X is E, K or Q
  MISC_FEATURE (19)..(19): X is K, E, or N
  MISC_FEATURE (19)..(19): X is K, E, or N
  MISC_FEATURE (20)..(20): X is N, Y , R or A
  MISC_FEATURE (22)..(22): X is N or G
  MISC_FEATURE (23)..(23): X is Y, N or D
  MISC_FEATURE (24)..(24): X is S, P or A
  MISC_FEATURE (25)..(25): X is E, D, K or T
  MISC_FEATURE (26)..(26): X is Q, D, K or T
  MISC_FEATURE (27)..(27): X is V, I or A
  MISC_FEATURE (29)..(29): X is D, E, R, or K
  MISC_FEATURE (30)..(30): X is V, E, or L
  MISC_FEATURE (33)..(33): X is K, E, or R
  MISC_FEATURE (35)..(35): X is V or I
  MISC_FEATURE (36)..(36): X is K A, or L
  MISC_FEATURE (37)..(37): X is K, E, or R
  MISC_FEATURE (38)..(38): X is I or V
  MISC_FEATURE (39)..(39): X is I, A, L or V
  MISC_FEATURE (40)..(40): X is E or K
  MISC_FEATURE (41)..(41): X is G, E, R, or S
  MISC_FEATURE (42)..(42): X is N, R, S, or D
  MISC_FEATURE (44)..(44): X is N or G
  MISC_FEATURE (45)..(45): X is N, S or D or G
XXXXXAXXAXXXXXXXXXXXPXXXXXXAXXAAXIXXXXXXXXPXX

SEQ ID NO: 2 - protein, 44 aa, Artificial Sequence
  Synthetic
  MISC_FEATURE (1)..(1): X is C, A, K or N
  MISC_FEATURE (2)..(2): X is D, Q or S
  MISC_FEATURE (3)..(3): X is C or A
  MISC_FEATURE (4)..(4): X is V or I
  MISC_FEATURE (6)..(6): X is K, A, D, or R
  MISC_FEATURE (9)..(9): X is S, A, R, or Y
  MISC_FEATURE (10)..(10): X is S or A
  MISC_FEATURE (12)..(12): X is I or V
  MISC_FEATURE (13)..(13): X is R, K, E, or A
  MISC_FEATURE (16)..(16): X is I, A, or L
  MISC_FEATURE (17)..(17): X is E or T
  MISC_FEATURE (18)..(18): X is K, Q or E
  MISC_FEATURE (19)..(19): X is N. L, A or F
  MISC_FEATURE (21)..(21): X is N or G
  MISC_FEATURE (22)..(22): X is Y, N or D
  MISC_FEATURE (23)..(23): X is S, P, A or E
  MISC_FEATURE (24)..(24): X is E, D or Q
  MISC_FEATURE (25)..(25): X is V or A
  MISC_FEATURE (26)..(26): X is V, I or A
  MISC_FEATURE (28)..(28): X is D, T, E, I
  MISC_FEATURE (34)..(34): X is V or I
  MISC_FEATURE (35)..(35): X is K, A, E or L
  MISC_FEATURE (37)..(37): X is I or V
  MISC_FEATURE (38)..(38): X is I, A, L or V
  MISC_FEATURE (39)..(39): X is E, K or D
  MISC_FEATURE (40)..(40): X is G, S, Q
  MISC_FEATURE (41)..(41): X is N, A, or S
  MISC_FEATURE (43)..(43): X is N or G
  MISC_FEATURE (44)..(44): X is S, D or G
XXXXAXAAXXIXXAVXXXXPXXXXXXAXVAAAIXXAXXXXXPXX

SEQ ID NO: 3 - protein, 43 aa, Artificial Sequence
  Synthetic
  MISC_FEATURE (1)..(1): X is R, E, N or D
  MISC_FEATURE (2)..(2): X is D, E, or K
  MISC_FEATURE (3)..(3): X is C or A
  MISC_FEATURE (4)..(4): X is V or I
  MISC_FEATURE (5)..(5): X is R, K, E or D
  MISC_FEATURE (6)..(6): X is K, A or N
  MISC_FEATURE (9)..(9): X is K, S or R
  MISC_FEATURE (10)..(10): X is S or A
  MISC_FEATURE (12)..(12): X is I, L or E
  MISC_FEATURE (13)..(13): X is R, K E or N
  MISC_FEATURE (16)..(16): X is R, K E or Q
  MISC_FEATURE (17)..(17): X is D, K, E or Q
  MISC_FEATURE (18)..(18): X is K, E or Q
  MISC_FEATURE (19)..(19): X is N, L, A or F
  MISC_FEATURE (20)..(20): X is P or E
  MISC_FEATURE (21)..(21): X is N or G
  MISC_FEATURE (22)..(22): X is Y, N or D
  MISC_FEATURE (23)..(23): X is S, P, E or N
  MISC_FEATURE (24)..(24): X is D, K, E or N
  MISC_FEATURE (25)..(25): X is V or A
  MISC_FEATURE (26)..(26): X is V, K, I or A
  MISC_FEATURE (27)..(27): X is E, K, R, or N
  MISC_FEATURE (28)..(28): X is D, I, K or T
  MISC_FEATURE (30)..(30): X is K, E, H, or R
  MISC_FEATURE (31)..(31): X is K, E, D, or R
  MISC_FEATURE (34)..(34): X is K, E, or R
  MISC_FEATURE (35)..(35): X is K, E, D or Q
  MISC_FEATURE (37)..(37): X is I or R
  MISC_FEATURE (38)..(38): X is E, Q, K or R
  MISC_FEATURE (39)..(39): X is E, D, K or R
  MISC_FEATURE (40)..(40): X is G, S, A or Q
  MISC_FEATURE (41)..(41): X is N, A, or D
  MISC_FEATURE (43)..(43): X is N or G
XXXXXXAAXXIXXAVXXXXXXXXXXXXXVXXAIXXAXXXXXPX

SEQ ID NO: 4 - protein, 45 aa, Artificial Sequence
  Synthetic
GCDQVAKDASSTIREVIEKNPNYSEKVADVAAKIVKKIIEGNPNG

SEQ ID NO: 5 - protein, 44 aa, Artificial Sequence
  Synthetic
CDCVAKAASSIIRAVIEKNPNYSEVVADVAAAIVKAIIEGNPNG

SEQ ID NO: 6 - protein, 43 aa, Artificial Sequence
  Synthetic
RDCVRKAASSIIRAVQEKNPNYSEVVEDVKRAIEKAIKEGNPN

SEQ ID NO: 7 - protein, 45 aa, Artificial Sequence
  Synthetic
  MISC_FEATURE (1)..(1): X is S, D, E, or T
  MISC_FEATURE (2)..(2): X is S, D, or T
  MISC_FEATURE (3)..(3): X is A or S
  MISC_FEATURE (4)..(4): X is D or E
  MISC_FEATURE (5)..(5): X is D, K R, or E
  MISC_FEATURE (7)..(7): X is A, K R, or E
  MISC_FEATURE (8)..(8): X is K, R, or E
  MISC_FEATURE (9)..(9): X is L, A, R, or E
  MISC_FEATURE (11)..(11): X is N, D, E, or Q
  MISC_FEATURE (12)..(12): X is K, E, or R
  MISC_FEATURE (14)..(14): X is E or R
  MISC_FEATURE (15)..(15): X is N, K, or E
  MISC_FEATURE (16)..(16): X is L, K, or E
  MISC_FEATURE (18)..(18): X is R or E
  MISC_FEATURE (19)..(19): X is N, K, R or E
  MISC_FEATURE (20)..(20): X is N, K, R or Q
  MISC_FEATURE (21)..(21): X is N or G
  MISC_FEATURE (22)..(22): X is N or D
  MISC_FEATURE (23)..(23): X is E, S,or D
  MISC_FEATURE (24)..(24): X is E, S, N or D
  MISC_FEATURE (26)..(26): X is A, Q, I or K
  MISC_FEATURE (27)..(27): X is K, E, or R
  MISC_FEATURE (30)..(30): X is K or  E
  MISC_FEATURE (31)..(31): X is K or L
  MISC_FEATURE (33)..(33): X is K, Q, or E
  MISC_FEATURE (34)..(34): X is R, T, or E
  MISC_FEATURE (37)..(37): X is K, T, or E
  MISC_FEATURE (38)..(38): X is R, Q, or E
  MISC_FEATURE (40)..(40): X is K or E
  MISC_FEATURE (41)..(41): X is K, R or E
  MISC_FEATURE (42)..(42): X is K, R or Q
  MISC_FEATURE (43)..(43): X is N or G
  MISC_FEATURE (44)..(44): X is E, S or D
  MISC_FEATURE (45)..(45): X is R, S or D
XXXXXAXXXAXXAXXXAXXXXXXXAXXAVXXIXXAIXXAXXXXXX

SEQ ID NO: 8 - protein, 44 aa, Artificial Sequence
  Synthetic
  MISC_FEATURE (1)..(1): X is D, T or E
  MISC_FEATURE (3)..(3): X is V, I or L
  MISC_FEATURE (4)..(4): X is E, K or Q
  MISC_FEATURE (7)..(7): X is E, K or A
  MISC_FEATURE (8)..(8): X is E, L, R or A
  MISC_FEATURE (11)..(11): X is K, E, R or Q
  MISC_FEATURE (14)..(14): X is N, I, K or Q
  MISC_FEATURE (15)..(15): X is K or L
  MISC_FEATURE (18)..(18): X is N, K, Q or D
  MISC_FEATURE (19)..(19): X is R, N or Q
  MISC_FEATURE (20)..(20): X is N, H, G or E
  MISC_FEATURE (21)..(21): X is D or N
  MISC_FEATURE (22)..(22): X is D, E or R
  MISC_FEATURE (23)..(23): X is D, E or R
  MISC_FEATURE (26)..(26): X is K, E or R
  MISC_FEATURE (29)..(29): X is K or A
  MISC_FEATURE (30)..(30): X is K, L or R
  MISC_FEATURE (33)..(33): X is K, E or R
  MISC_FEATURE (37)..(37): X is R, E, A or L
  MISC_FEATURE (40)..(40): X is R, E, Q or K
  MISC_FEATURE (41)..(41): X is R, Q or K
  MISC_FEATURE (42)..(42): X is N or G
  MISC_FEATURE (43)..(43): X is E, S or D
  MISC_FEATURE (44)..(44): X is R, E, S or D
XAXXAAXXAAXALXXALXXXXXXAAXAVXXIAXAIIXALXXXXX

SEQ ID NO: 9 - protein, 44 aa, Artificial Sequence
  Synthetic
  MISC_FEATURE (1)..(1): X is D, E or S
  MISC_FEATURE (3)..(3): X is V, I or L
  MISC_FEATURE (4)..(4): X is E, K, R or D
  MISC_FEATURE (5)..(5): X is K, R or N
  MISC_FEATURE (7)..(7): X is K, R, A or Q
  MISC_FEATURE (8)..(8): X is K, R, E or Q
  MISC_FEATURE (11)..(11): X is K, R, or E
  MISC_FEATURE (12)..(12): X is K, N, T or E
  MISC_FEATURE (14)..(14): X is K, N, I or S
  MISC_FEATURE (15)..(15): X is K, E, Q or R
  MISC_FEATURE (18)..(18): X is N, Q, K or D
  MISC_FEATURE (19)..(19): X is R, E, K, or N
  MISC_FEATURE (20)..(20): X is G, H or N
  MISC_FEATURE (21)..(21): X is D, S or N
  MISC_FEATURE (22)..(22): X is D, E or Q
  MISC_FEATURE (23)..(23): X is D or E
  MISC_FEATURE (24)..(24): X is Q, K, A or E
  MISC_FEATURE (26)..(26): X is K or R
  MISC_FEATURE (27)..(27): X is H, K, E or N
  MISC_FEATURE (29)..(29): X is  K or A
  MISC_FEATURE (30)..(30): X is K or E
  MISC_FEATURE (31)..(31): X is Q, R, T or E
  MISC_FEATURE (33)..(33): X is E, R or K
  MISC_FEATURE (34)..(34): X is N, Q or K
  MISC_FEATURE (37)..(37): X is R, E, K, or Q
  MISC_FEATURE (38)..(38): X is A or D
  MISC_FEATURE (40)..(40): X is K, Q or R
  MISC_FEATURE (41)..(41): X is R, K, D or E
  MISC_FEATURE (42)..(42): X is N or G
  MISC_FEATURE (43)..(43): X is Q, E or D
  MISC_FEATURE (44)..(44): X is D, S, E or T
XAXXXAXXAAXXLXXALXXXXXXXAXXVXXXAXXIIXXLXXXXX

SEQ ID NO: 10 - protein, 45 aa, Artificial Sequence
  Synthetic
SDADEAAKEANKAENKARNRNDDEAAKAVKLIKEAIERAKKRNES

SEQ ID NO: 11 - protein, 44 aa, Artificial Sequence
  Synthetic
DAVEAAKEAAKALNKALNRNDDEAAKAVALIAEAIIRALKRNES

SEQ ID NO: 12 - protein, 44 aa, Artificial Sequence
  Synthetic
DAVEKAKEAAKNLNKALNRNDDEQAKHVAKQAENIIRALKRNES

SEQ ID NO: 13 - protein, 43 aa, Artificial Sequence
  Synthetic
  MISC_FEATURE (1)..(1): X is S or D
  MISC_FEATURE (2)..(2): X is S or T
  MISC_FEATURE (3)..(3): X is E or D
  MISC_FEATURE (4)..(4): X is Q, E or D
  MISC_FEATURE (5)..(5): X is T, A, D or E
  MISC_FEATURE (6)..(6): X is V or I
  MISC_FEATURE (7)..(7): X is R, K or Q
  MISC_FEATURE (8)..(8): X is K, E, R, or D
  MISC_FEATURE (9)..(9): X is I, A or V
  MISC_FEATURE (10)..(10): X is A or S
  MISC_FEATURE (11)..(11): X is Q, K or E
  MISC_FEATURE (12)..(12): X is Q, K, D or R
  MISC_FEATURE (13)..(13): X is C, A, V or I
  MISC_FEATURE (14)..(14): X is S, A, or R
  MISC_FEATURE (15)..(15): X is E, K, D or N
  MISC_FEATURE (16)..(16): X is A or D
  MISC_FEATURE (18)..(18): X is R, K, E or Q
  MISC_FEATURE (19)..(19): X is T, K, or E
  MISC_FEATURE (20)..(20): X is S, N, Q or E
  MISC_FEATURE (21)..(21): X is  N, or K
  MISC_FEATURE (22)..(22): X is  N or D
  MISC_FEATURE (23)..(23): X is C or T
  MISC_FEATURE (24)..(24): X is E, D, R or T
  MISC_FEATURE (25)..(25): X is E, K, or R
  MISC_FEATURE (28)..(28): X is E, K, Q or R
  MISC_FEATURE (29)..(29): X is E, K, D or R
  MISC_FEATURE (30)..(30): X is C or A
  MISC_FEATURE (32)..(32): X is K, E, T or D
  MISC_FEATURE (33)..(33): X is K, E, T or I
  MISC_FEATURE (34)..(34): X is I or V
  MISC_FEATURE (35)..(35): X is S, R, A, or E
  MISC_FEATURE (36)..(36): X is E, K, D or N
  MISC_FEATURE (37)..(37): X is A, L or T
  MISC_FEATURE (38)..(38): X is A, I or T
  MISC_FEATURE (39)..(39): X is R, K , E or T
  MISC_FEATURE (40)..(40): X is K , E or Q
  MISC_FEATURE (41)..(41): X is S, A, or L
  MISC_FEATURE (42)..(42): X is N or G
  MISC_FEATURE (43)..(43): X is N or S
XXXXXXXXXXXXXXXXIXXXXXXXXAAXXXAXXXXXXXXXXXX

SEQ ID NO: 14 - protein, 42 aa, Artificial Sequence
  Synthetic
  MISC_FEATURE (1)..(1): X is S, T or E
  MISC_FEATURE (2)..(2): X is D or E
  MISC_FEATURE (4)..(4): X is A, L or T
  MISC_FEATURE (5)..(5): X is V or I
  MISC_FEATURE (6)..(6): X is R or K
  MISC_FEATURE (8)..(8): X is I, V or A
  MISC_FEATURE (9)..(9): X is S or A
  MISC_FEATURE (10)..(10): X is Q, E or A
  MISC_FEATURE (11)..(11): X is V or A
  MISC_FEATURE (12)..(12): X is C, I, V or A
  MISC_FEATURE (13)..(13): X is S, A or R
  MISC_FEATURE (14)..(14): X is E or A
  MISC_FEATURE (17)..(17): X is R, K, E or Q
  MISC_FEATURE (18)..(18): X is E or T
  MISC_FEATURE (19)..(19): X is S or A
  MISC_FEATURE (21)..(21): X is N or D
  MISC_FEATURE (22)..(22): X is C or T
  MISC_FEATURE (23)..(23): X is E, D or K
  MISC_FEATURE (24)..(24): X is C, A or S
  MISC_FEATURE (27)..(27): X is R, K, E or H
  MISC_FEATURE (29)..(29): X is C or A
  MISC_FEATURE (31)..(31): X is K, E, T or R
  MISC_FEATURE (33)..(33): X is I or V
  MISC_FEATURE (34)..(34): X is S, R, A or E
  MISC_FEATURE (35)..(35): X is K, Q, A or E
  MISC_FEATURE (36)..(36): X is A or L
  MISC_FEATURE (37)..(37): X is A, I or V
  MISC_FEATURE (38)..(38): X is R, E or K
  MISC_FEATURE (39)..(39): X is R, E or Q
  MISC_FEATURE (40)..(40): X is S, A or Q
  MISC_FEATURE (41)..(41): X is N or G
  MISC_FEATURE (42)..(42): X is S or D
XXLXXXIXXXXXXXAIXXXNXXXXAAXIXAXIXXXXXXXXXX

SEQ ID NO: 15 - protein, 42 aa, Artificial Sequence
  Synthetic
  MISC_FEATURE (1)..(1): X is S,D, E or P
  MISC_FEATURE (2)..(2): X is D or E
  MISC_FEATURE (3)..(3): X is L or K
  MISC_FEATURE (4)..(4): X is L, A or R
  MISC_FEATURE (5)..(5): X is K, E , R or D
  MISC_FEATURE (6)..(6): X is K, R or Q
  MISC_FEATURE (8)..(8): X is A, I or V
  MISC_FEATURE (9)..(9): X is K, D, E or N
  MISC_FEATURE (10)..(10): X is Q, E or A
  MISC_FEATURE (11)..(11): X is V or A
  MISC_FEATURE (12)..(12): X is C, E, K or A
  MISC_FEATURE (13)..(13): X is S, E, K or R
  MISC_FEATURE (14)..(14): X is E or A
  MISC_FEATURE (16)..(16): X is R or K
  MISC_FEATURE (17)..(17): X is R, E, Q or K
  MISC_FEATURE (18)..(18): X is  E, T or V
  MISC_FEATURE (19)..(19): X is  S or A
  MISC_FEATURE (20)..(20): X is  N or K
  MISC_FEATURE (21)..(21): X is  N or D
  MISC_FEATURE (22)..(22): X is  T, D, E or K
  MISC_FEATURE (23)..(23): X is  D, E or K
  MISC_FEATURE (24)..(24): X is C, A, or S
  MISC_FEATURE (26)..(26): X is  K, T , D or N
  MISC_FEATURE (27)..(27): X is  R, E or K
  MISC_FEATURE (29)..(29): X is  C, A ,S or T
  MISC_FEATURE (30)..(30): X is Q, E, K or T
  MISC_FEATURE (31)..(31): X is Q, E, K or R
  MISC_FEATURE (33)..(33): X is E, K or R
  MISC_FEATURE (34)..(34): X is S, E, K or R
  MISC_FEATURE (35)..(35): X is E, A, Q or R
  MISC_FEATURE (36)..(36): X is A or L
  MISC_FEATURE (37)..(37): X is K, R or E
  MISC_FEATURE (38)..(38): X is R, E, K or N
  MISC_FEATURE (39)..(39): X is E or Q
  MISC_FEATURE (40)..(40): X is S, N or Q
  MISC_FEATURE (41)..(41): X is N or G
  MISC_FEATURE (42)..(42): X is S or D
XXXXXXIXXXXXXXAXXXXXXXXXAXXIXXXIXXXXXXXXXX

SEQ ID NO: 16 - protein, 43 aa, Artificial Sequence
  Synthetic
SSEDTVRKIAQKCSEAIRESNDCEEAARKCAKTISEAIRESNS

SEQ ID NO: 17 - protein, 42 aa, Artificial Sequence
  Synthetic
SELAVRIIAQVCSEAIRESNDCECAARICAKIISEAIRESNS

SEQ ID NO: 18 - protein, 42 aa, Artificial Sequence
  Synthetic
SELAKRIIKQVCSEAKRESNDTECAKRICTKIKSEAKRESNS

SEQ ID NO: 19 - protein, 42 aa, Artificial Sequence
  Synthetic
  MISC_FEATURE (1)..(1): X is S or D
  MISC_FEATURE (2)..(2): X is E or D
  MISC_FEATURE (3)..(3): X is E, K or D
  MISC_FEATURE (4)..(4): X is E, K, R or D
  MISC_FEATURE (5)..(5): X is E, K, N or Q
  MISC_FEATURE (6)..(6): X is E, K, T or R
  MISC_FEATURE (8)..(8): X is E, K, L or R
  MISC_FEATURE (9)..(9): X is E, K, Q or N
  MISC_FEATURE (10)..(10): X is E, K, Q or L
  MISC_FEATURE (12)..(12): X is R or E
  MISC_FEATURE (13)..(13): X is R, D, T or E
  MISC_FEATURE (17)..(17): X is K, Q or E
  MISC_FEATURE (18)..(18): X is L, N or Q
  MISC_FEATURE (20)..(20): X is S or A
  MISC_FEATURE (21)..(21): X is S or N
  MISC_FEATURE (22)..(22): X is D, E, S or Q
  MISC_FEATURE (23)..(23): X is D or E
  MISC_FEATURE (24)..(24): X is Q, D, H or E
  MISC_FEATURE (26)..(26): X is R, D, K or E
  MISC_FEATURE (27)..(27): X is R, Q, K or E
  MISC_FEATURE (28)..(28): X is C, A, N or W
  MISC_FEATURE (29)..(29): X is F, T or W
  MISC_FEATURE (30)..(30): X is E, R or K
  MISC_FEATURE (31)..(31): X is E, R or Q
  MISC_FEATURE (33)..(33): X is A, R, K or S
  MISC_FEATURE (34)..(34): X is E, N, K or S
  MISC_FEATURE (35)..(35): X is W or A
  MISC_FEATURE (37)..(37): X is E, K, N or S
  MISC_FEATURE (38)..(38): X is R, E, or Q
  MISC_FEATURE (39)..(39): X is T or A
  MISC_FEATURE (41)..(41): X is S, V or A
  MISC_FEATURE (42)..(42): X is S, N, D or T
XXXXXXAXXXVXXAAKXXGXXXXXAXXXXXXAXXXAXXXGXX

SEQ ID NO: 20 - protein, 42 aa, Artificial Sequence
  Synthetic
  MISC_FEATURE (2)..(2): X is Y, A, or W
  MISC_FEATURE (3)..(3): X is E, L ,Q, or R
  MISC_FEATURE (6)..(6): X is E, H or K
  MISC_FEATURE (8)..(8): X is L or A
  MISC_FEATURE (9)..(9): X is F or A
  MISC_FEATURE (10)..(10): X is K, E, Q, or N
  MISC_FEATURE (12)..(12): X is L or A
  MISC_FEATURE (13)..(13): X is E or K
  MISC_FEATURE (16)..(16): X is Y, H, A or W
  MISC_FEATURE (17)..(17): X is K or R
  MISC_FEATURE (18)..(18): X is L or N
  MISC_FEATURE (20)..(20): X is S or A
  MISC_FEATURE (23)..(23): X is E, D, or R
  MISC_FEATURE (24)..(24): X is E or Q
  MISC_FEATURE (26)..(26): X is C, A, R, or L
  MISC_FEATURE (27)..(27): X is E, K, or Q
  MISC_FEATURE (28)..(28): X is C, A, or W
  MISC_FEATURE (30)..(30): X is N, D, E or S
  MISC_FEATURE (31)..(31): X is Q, E or R
  MISC_FEATURE (34)..(34): X is Q, E,K or R
  MISC_FEATURE (37)..(37): X is Q, S, K or E
  MISC_FEATURE (38)..(38): X is R, K or E
  MISC_FEATURE (39)..(39): X is T or N
  MISC_FEATURE (41)..(41): X is S, A or V
  MISC_FEATURE (42)..(42): X is G, T or V
AXXAAXAXXXVXXAAXXXGXSAXXAXXXFXXAAXWAXXXGXX

SEQ ID NO: 21 - protein, 42 aa, Artificial Sequence
  Synthetic
  MISC_FEATURE (2)..(2): X is Y, A, or K
  MISC_FEATURE (3)..(3): X is E, D, or Q
  MISC_FEATURE (6)..(6): X is E, H, K or R
  MISC_FEATURE (7)..(7): X is E, K or R
  MISC_FEATURE (8)..(8): X is L or A
  MISC_FEATURE (9)..(9): X is F or A
  MISC_FEATURE (10)..(10): X is E, Q, K or R
  MISC_FEATURE (11)..(11): X is E, V or Q
  MISC_FEATURE (12)..(12): X is L or A
  MISC_FEATURE (14)..(14): X is R, E, K or N
  MISC_FEATURE (16)..(16): X is W, A, H or Y
  MISC_FEATURE (17)..(17): X is E or K
  MISC_FEATURE (18)..(18): X is E, R, N or Q
  MISC_FEATURE (20)..(20): X is E, K, L or S
  MISC_FEATURE (21)..(21): X is D or S
  MISC_FEATURE (23)..(23): X is E, R, D or K
  MISC_FEATURE (24)..(24): X is E, R, or Q
  MISC_FEATURE (26)..(26): X is C, R, A or T
  MISC_FEATURE (27)..(27): X is E, K or R
  MISC_FEATURE (28)..(28): X is E or Q
  MISC_FEATURE (29)..(29): X is F or Y
  MISC_FEATURE (30)..(30): X is N, D or S
  MISC_FEATURE (31)..(31): X is K, R or E
  MISC_FEATURE (32)..(32): X is K, R, D or E
  MISC_FEATURE (33)..(33): X is A, Q or E
  MISC_FEATURE (34)..(34): X is R, K or E
  MISC_FEATURE (35)..(35): X is R, K or E
  MISC_FEATURE (37)..(37): X is R, K, Q or H
  MISC_FEATURE (38)..(38): X is R, K, or E
  MISC_FEATURE (39)..(39): X is N, K, D or E
  MISC_FEATURE (41)..(41): X is Q, K, or T
  MISC_FEATURE (42)..(42): X is Q, K, N or T
AXXAAXXXXXXXEXAXXXGXXAXXAXXXXXXXXXXAXXXGXX

SEQ ID NO: 22 - protein, 42 aa, Artificial Sequence
  Synthetic
SEEKEEALKKVREAAKKLGSSDEEARKCFEEAREWAERTGSS

SEQ ID NO: 23 - protein, 42 aa, Artificial Sequence
  Synthetic
AYEAAEALFKVLEAAYKLGSSAEEACECFNQAAEWAERTGSG

SEQ ID NO: 24 - protein, 42 aa, Artificial Sequence
  Synthetic
AYEAAERLFEELERAYEEGSSAEEACEEFNKKEEEAHRKGKK

SEQ ID NO: 25 - protein, 43 aa, Artificial Sequence
  Synthetic
  MISC_FEATURE (2)..(2): X is T, S, or D
  MISC_FEATURE (3)..(3): X is K, Q, or E
  MISC_FEATURE (4)..(4): X is D, R, or E
  MISC_FEATURE (5)..(5): X is D or K
  MISC_FEATURE (7)..(7): X is R, E, T or K
  MISC_FEATURE (8)..(8): X is R, E, S or K
  MISC_FEATURE (9)..(9): X is T, E, or Q
  MISC_FEATURE (11)..(11): X is R, K E, or Q
  MISC_FEATURE (12)..(12): X is R, K or Q
  MISC_FEATURE (15)..(15): X is R, E or Q
  MISC_FEATURE (16)..(16): X is R, E, H or K
  MISC_FEATURE (19)..(19): X is R, E, N or K
  MISC_FEATURE (20)..(20): X is S, Q, D or K
  MISC_FEATURE (21)..(21): X is N, R or K
  MISC_FEATURE (22)..(22): X is N, D or S
  MISC_FEATURE (23)..(23): X is E, P or K
  MISC_FEATURE (24)..(24): X is E, D, N or K
  MISC_FEATURE (25)..(25): X is E, D, V or Q
  MISC_FEATURE (27)..(27): X is E, R, K or H
  MISC_FEATURE (28)..(28): X is E, R, K or Q
  MISC_FEATURE (31)..(31): X is E, R, K or Q
  MISC_FEATURE (32)..(32): X is E, R, K or D
  MISC_FEATURE (34)..(34): X is L, R, K or A
  MISC_FEATURE (35)..(35): X is R, K or E
  MISC_FEATURE (36)..(36): X is V or A
  MISC_FEATURE (38)..(38): X is K, D, Q or E
  MISC_FEATURE (39)..(39): X is K, R, Q or E
  MISC_FEATURE (42)..(42): X is M, A or L
  MISC_FEATURE (43)..(43): X is P, D, T or N
SXXXXAXXXCXXAAXXAAXXXXXXXAXXAAXXCXXXAXXAGXX

SEQ ID NO: 26 - protein, 42 aa, Artificial Sequence
  Synthetic
  MISC_FEATURE (1)..(1): X is T, R, A, or E
  MISC_FEATURE (2)..(2): X is R or K
  MISC_FEATURE (3)..(3): X is E, R or K
  MISC_FEATURE (6)..(6): X is E, R, Q or K
  MISC_FEATURE (7)..(7): X is E, S, D or K
  MISC_FEATURE (10)..(10): X is E, Q, R or K
  MISC_FEATURE (14)..(14): X is E, R or K
  MISC_FEATURE (18)..(18): X is E or R
  MISC_FEATURE (19)..(19): X is S, Q, E or H
  MISC_FEATURE (20)..(20): X is N, K or R
  MISC_FEATURE (21)..(21): X is D or S
  MISC_FEATURE (22)..(22): X is E, P, K or T
  MISC_FEATURE (23)..(23): X is E, D, K or T
  MISC_FEATURE (24)..(24): X is V or A
  MISC_FEATURE (26)..(26): X is K, E or R
  MISC_FEATURE (27)..(27): X is I, V or A
  MISC_FEATURE (30)..(30): X is K,R, Y or I
  MISC_FEATURE (33)..(33): X is K,R, L or A
  MISC_FEATURE (34)..(34): X is E, A, Q or R
  MISC_FEATURE (35)..(35): X is  A, or V
  MISC_FEATURE (37)..(37): X is K, D, E, or Q
  MISC_FEATURE (38)..(38): X is N,  E, or Q
  MISC_FEATURE (41)..(41): X is M, A  or L
  MISC_FEATURE (42)..(42): X is P, D  or T
XXXAAXXFCXAAAXAAAXXXXXXXAXXAAXACXXXAXXAGXX

SEQ ID NO: 27 - protein, 42 aa, Artificial Sequence
  Synthetic
  MISC_FEATURE (1)..(1): X is T, R, K, or P
  MISC_FEATURE (2)..(2): X is R or K
  MISC_FEATURE (3)..(3): X is E, R or K
  MISC_FEATURE (6)..(6): X is E, R, Q or K
  MISC_FEATURE (7)..(7): X is E, D, S or K
  MISC_FEATURE (10)..(10): X is E, R or K
  MISC_FEATURE (13)..(13): X is E or K
  MISC_FEATURE (14)..(14): X is E, R, Q or K
  MISC_FEATURE (17)..(17): X is R, D, E or K
  MISC_FEATURE (18)..(18): X is E or K
  MISC_FEATURE (19)..(19): X is K, Q, N or S
  MISC_FEATURE (20)..(20): X is K, N or G
  MISC_FEATURE (21)..(21): X is D or S
  MISC_FEATURE (22)..(22): X is E, P, D or S
  MISC_FEATURE (23)..(23): X is E, K, Q or T
  MISC_FEATURE (24)..(24): X is V or A
  MISC_FEATURE (25)..(25): X is E, K or R
  MISC_FEATURE (26)..(26): X is E, K or R
  MISC_FEATURE (27)..(27): X is I, V or A
  MISC_FEATURE (29)..(29): X is K, R, E or D
  MISC_FEATURE (30)..(30): X is K, R, E or Q
  MISC_FEATURE (33)..(33): X is K, R, E or Q
  MISC_FEATURE (34)..(34): X is K, A, E or Q
  MISC_FEATURE (35)..(35): X is A, or V
  MISC_FEATURE (36)..(36): X is A, K, L or R
  MISC_FEATURE (37)..(37): X is E, K, D or R
  MISC_FEATURE (38)..(38): X is E or Q
  MISC_FEATURE (41)..(41): X is M, A or L
  MISC_FEATURE (42)..(42): X is P, D or T
XXXAAXXFCXAAXXAAXXXXXXXXXXXAXXACXXXXXXAGXX

SEQ ID NO: 28 - protein, 43 aa, Artificial Sequence
  Synthetic
STKEDARSTCEKAARKAAESNDEEVAKQAAKDCLEVAKQAGMP

SEQ ID NO: 29 - protein, 42 aa, Artificial Sequence
  Synthetic
TKEAARSFCEAAARAAAESNDEEVAKIAAKACLEVAKQAGMP

SEQ ID NO: 30 - protein, 42 aa, Artificial Sequence
  Synthetic
TKEAARSFCEAAKRAAKESNDEEVEKIAKKACKEVAKQAGMP

SEQ ID NO: 31 - protein, 46 aa, Artificial Sequence
  Synthetic
  MISC_FEATURE (1)..(1): X is S, D, or T
  MISC_FEATURE (2)..(2): X is S, D, N or T
  MISC_FEATURE (3)..(3): X is E, D, K or T
  MISC_FEATURE (4)..(4): X is M, A, I or Q
  MISC_FEATURE (5)..(6): X is K, E, R or Q
  MISC_FEATURE (7)..(7): X is V or A
  MISC_FEATURE (8)..(8): X is M, K, L or R
  MISC_FEATURE (9)..(9): X is K or E
  MISC_FEATURE (10)..(10): X is A or L
  MISC_FEATURE (11)..(11): X is W or L
  MISC_FEATURE (12)..(12): X is K, E, R or D
  MISC_FEATURE (13)..(13): X is K, E, or R
  MISC_FEATURE (15)..(15): X is A, V, or I
  MISC_FEATURE (16)..(16): X is E, Q, D or K
  MISC_FEATURE (17)..(17): X is L, Q, or I
  MISC_FEATURE (19)..(19): X is K, S, or R
  MISC_FEATURE (20)..(20): X is K, N, Q, or D
  MISC_FEATURE (21)..(21): X is N, S, or D
  MISC_FEATURE (22)..(22): X is N, or G
  MISC_FEATURE (23)..(23): X is N or D
  MISC_FEATURE (24)..(24): X is E, P, K or D
  MISC_FEATURE (25)..(25): X is E,  K or D
  MISC_FEATURE (26)..(26): X is V, A or Q
  MISC_FEATURE (28)..(28): X is R, K or E
  MISC_FEATURE (29)..(29): X is R, K, A or E
  MISC_FEATURE (31)..(31): X is R, K, Q or E
  MISC_FEATURE (32)..(32): X is R, K, H or E
  MISC_FEATURE (35)..(35): X is D, K, R or E
  MISC_FEATURE (36)..(36): X is R or E
  MISC_FEATURE (37)..(37): X is I or A
  MISC_FEATURE (38)..(38): X is K, A, E or V
  MISC_FEATURE (39)..(39): X is K, D, E or R
  MISC_FEATURE (41)..(41): X is L or A
  MISC_FEATURE (42)..(42): X is R, K, E or N
  MISC_FEATURE (43)..(43): X is Q, K, E or N
  MISC_FEATURE (44)..(44): X is V, A, I or N
  MISC_FEATURE (45)..(45): X is D, P, T or N
  MISC_FEATURE (46)..(46): X is D, Q, T or S
XXXXXXXXXXXXXAXXXAXXXXXXXXAXXIXXAAXXXXXAXXXXXX

SEQ ID NO: 32 - protein, 45 aa, Artificial Sequence
  Synthetic
  MISC_FEATURE (1)..(1): X is D, E, S, or K
  MISC_FEATURE (2)..(2): X is E, D, K or L
  MISC_FEATURE (3)..(3): X is M, A or V
  MISC_FEATURE (4)..(4): X is A, W, I or L
  MISC_FEATURE (5)..(5): X is K, E or R
  MISC_FEATURE (6)..(6): X is V or A
  MISC_FEATURE (7)..(7): X is M, L or A
  MISC_FEATURE (8)..(8): X is L, E, Y or A
  MISC_FEATURE (9)..(9): X is L or A
  MISC_FEATURE (10)..(10): X is L or W
  MISC_FEATURE (12)..(12): X is K, E, L or Q
  MISC_FEATURE (14)..(14): X is A, V or I
  MISC_FEATURE (15)..(15): X is A, L or R
  MISC_FEATURE (16)..(16): X is L, I, Q or E
  MISC_FEATURE (19)..(19): X is K, Q, R or E
  MISC_FEATURE (20)..(20): X is N, S, or D
  MISC_FEATURE (21)..(21): X is N or G
  MISC_FEATURE (22)..(22): X is N or D
  MISC_FEATURE (23)..(23): X is A or D
  MISC_FEATURE (24)..(24): X is E, K or D
  MISC_FEATURE (25)..(25): X is V, A or Q
  MISC_FEATURE (27)..(27): X is R, A, I or Q
  MISC_FEATURE (28)..(28): X is R, E, I or Q
  MISC_FEATURE (31)..(31): X is R, K, E or H
  MISC_FEATURE (34)..(34): X is  K, E or A
  MISC_FEATURE (35)..(35): X is  R, E or Q
  MISC_FEATURE (36)..(36): X is I or A
  MISC_FEATURE (37)..(37): X is V or A
  MISC_FEATURE (38)..(38): X is E, R, D or K
  MISC_FEATURE (40)..(40): X is L or A
  MISC_FEATURE (41)..(41): X is R, E, K or A
  MISC_FEATURE (42)..(42): X is Q, E, K or T
  MISC_FEATURE (43)..(43): X is N, V, A, or I
  MISC_FEATURE (44)..(44): X is N, T, Q, or K
  MISC_FEATURE (45)..(45): X is S, D or T
XXXXXXXXXXAXAXXXAAXXXXXXXAXXIAXAAXXXXXAXXXXXX

SEQ ID NO: 33 - protein, 45 aa, Artificial Sequence
  Synthetic
  MISC_FEATURE (1)..(1): X is D, E, or R
  MISC_FEATURE (2)..(2): X is D, E, K or Q
  MISC_FEATURE (3)..(3): X is M, A, or V
  MISC_FEATURE (4)..(4): X is  A, W, I or L
  MISC_FEATURE (5)..(5): X is  K, D, E or R
  MISC_FEATURE (6)..(6): X is  K, D, E or T
  MISC_FEATURE (7)..(7): X is  M, A, or L
  MISC_FEATURE (8)..(8): X is  R, E, A, or L
  MISC_FEATURE (9)..(9): X is  R, E, or K
  MISC_FEATURE (10)..(10): X is  R, E, W or L
  MISC_FEATURE (12)..(12): X is  K, E or Q
  MISC_FEATURE (13)..(13): X is  K, E, R or S
  MISC_FEATURE (14)..(14): X is  V, A or I
  MISC_FEATURE (15)..(15): X is  L, A or R
  MISC_FEATURE (16)..(16): X is  D, R, K or Q
  MISC_FEATURE (17)..(17): X is  A or L
  MISC_FEATURE (19)..(19): X is  K, Q or R
  MISC_FEATURE (20)..(20): X is  N, S, D or E
  MISC_FEATURE (21)..(21): X is  N or G
  MISC_FEATURE (22)..(22): X is  N or D
  MISC_FEATURE (23)..(23): X is A or D
  MISC_FEATURE (24)..(24): X is E, K or D
  MISC_FEATURE (25)..(25): X is E, K, T or S
  MISC_FEATURE (27)..(27): X is R, A, I or K
  MISC_FEATURE (28)..(28): X is R, E or K
  MISC_FEATURE (29)..(29): X is I, Q, R or T
  MISC_FEATURE (31)..(31): X is R, E, K or D
  MISC_FEATURE (32)..(32): X is Q, E, K or N
  MISC_FEATURE (34)..(34): X is A, E or V
  MISC_FEATURE (35)..(35): X is R, E or K
  MISC_FEATURE (36)..(36): X is D, A, E or K
  MISC_FEATURE (37)..(37): X is A or V
  MISC_FEATURE (38)..(38): X is E, R, D or K
  MISC_FEATURE (39)..(39): X is A, E, N or K
  MISC_FEATURE (40)..(40): X is D, A, E or L
  MISC_FEATURE (41)..(41): X is R, A, K or D
  MISC_FEATURE (42)..(42): X is R, E, K or Q
  MISC_FEATURE (43)..(43): X is N or G
  MISC_FEATURE (44)..(44): X is N, Q, T or E
  MISC_FEATURE (45)..(45): X is S, T or D
XXXXXXXXXXAXXXXXXAXXXXXXXAXXXAXXAXXXXXXXXXXXX

SEQ ID NO: 34 - protein, 46 aa, Artificial Sequence
  Synthetic
SDEMKKVMEALKKAVELAKKNNDDEVAREIERAAKEIVEALRENNS

SEQ ID NO: 35 - protein, 45 aa, Artificial Sequence
  Synthetic
DEMAKVMLALAKAVLLAAKNNDDEVAREIARAAAEIVEALRENNS

SEQ ID NO: 36 - protein, 45 aa, Artificial Sequence
  Synthetic
DEMAKKMLELAKRVLDAAKNNDDETAREIARQAAEEVEADRENNS

SEQ ID NO: 37 - protein, 51 aa, Artificial Sequence
  Synthetic
  MISC_FEATURE (1)..(1): X is S or D
  MISC_FEATURE (2)..(2): X is Y, T, S or D
  MISC_FEATURE (3)..(3): X is E, T or D
  MISC_FEATURE (4)..(4): X is E or D
  MISC_FEATURE (5)..(5): X is E, T or D
  MISC_FEATURE (7)..(8): X is E, K or R
  MISC_FEATURE (9)..(9): X is E, K, D or R
  MISC_FEATURE (11)..(11): X is E, K, or R
  MISC_FEATURE (12)..(12): X is T, K, or R
  MISC_FEATURE (13)..(13): X is V or I
  MISC_FEATURE (15)..(15): X is N, E, R or D
  MISC_FEATURE (16)..(16): X is K, E, T or D
  MISC_FEATURE (17)..(17): X is V or A
  MISC_FEATURE (18)..(18): X is E, R, or K
  MISC_FEATURE (19)..(19): X is E, R, or K
  MISC_FEATURE (21)..(21): X is Y, W, A or K
  MISC_FEATURE (22)..(22): X is R, E, K or D
  MISC_FEATURE (23)..(23): X is S, N, K or D
  MISC_FEATURE (25)..(25): X is T or V
  MISC_FEATURE (26)..(26): X is S or D
  MISC_FEATURE (27)..(27): X is E, P, N or T
  MISC_FEATURE (28)..(28): X is E, D or T
  MISC_FEATURE (29)..(29): X is E, K or Q
  MISC_FEATURE (32)..(32): X is E, K, D or Q
  MISC_FEATURE (33)..(33): X is E, K, R or T
  MISC_FEATURE (34)..(34): X is V or A
  MISC_FEATURE (36)..(36): X is R, E, K or D
  MISC_FEATURE (37)..(37): X is E, Q, N or D
  MISC_FEATURE (38)..(38): X is I, V or L
  MISC_FEATURE (39)..(39): X is S, A, R or E
  MISC_FEATURE (40)..(40): X is K, R or E
  MISC_FEATURE (41)..(41): X is V, T, D, or K
  MISC_FEATURE (42)..(42): X is I, A or L
  MISC_FEATURE (43)..(43): X is R, K, E, or Q
  MISC_FEATURE (44)..(44): X is T, K, E, or D
  MISC_FEATURE (46)..(46): X is K, E, or Q
  MISC_FEATURE (47)..(47): X is K, E, R or D
  MISC_FEATURE (48)..(48): X is K, S, R or D
  MISC_FEATURE (50)..(50): X is K, S, or Q
  MISC_FEATURE (51)..(51): X is S or D
XXXXXAXXXAXXXAXXXXXLXXXGXXXXXIAXXXAXXXXXXXXXLXXXGXX

SEQ ID NO: 38 - protein, 50 aa, Artificial Sequence
  Synthetic
  MISC_FEATURE (1)..(1): X is Y, E, S, or D
  MISC_FEATURE (2)..(2): X is K, E, S, or D
  MISC_FEATURE (3)..(3): X is V, E, A, or D
  MISC_FEATURE (6)..(6): X is  E, K, H or R
  MISC_FEATURE (7)..(7): X is  I or V
  MISC_FEATURE (8)..(8): X is  L, I or V
  MISC_FEATURE (10)..(10): X is R, Q, E or A
  MISC_FEATURE (11)..(11): X is I, V or A
  MISC_FEATURE (12)..(12): X is I or V
  MISC_FEATURE (14)..(14): X is E, A, K or R
  MISC_FEATURE (15)..(15): X is I or V
  MISC_FEATURE (16)..(16): X is A or V
  MISC_FEATURE (17)..(17): X is E, K, Q, or R
  MISC_FEATURE (20)..(20): X is W, K, Q, or H
  MISC_FEATURE (21)..(21): X is R, E, D orQ
  MISC_FEATURE (22)..(22): X is S, E, or N
  MISC_FEATURE (24)..(24): X is T or V
  MISC_FEATURE (25)..(25): X is S or D
  MISC_FEATURE (25)..(25): X is T or V
  MISC_FEATURE (26)..(26): X is E, T or P
  MISC_FEATURE (27)..(27): X is D, E, T or Q
  MISC_FEATURE (28)..(28): X is  E, L or Q
  MISC_FEATURE (31)..(31): X is  E, K, R or D
  MISC_FEATURE (32)..(32): X is  I or V
  MISC_FEATURE (33)..(33): X is  A or V
  MISC_FEATURE (35)..(35): X is  R, E, H, or I
  MISC_FEATURE (36)..(36): X is  V or I
  MISC_FEATURE (37)..(37): X is  L, V or I
  MISC_FEATURE (38)..(38): X is  S, A, E or K
  MISC_FEATURE (39)..(39): X is  R, E or V
  MISC_FEATURE (40)..(40): X is  I or V
  MISC_FEATURE (41)..(41): X is  I or L
  MISC_FEATURE (42)..(42): X is  R, E, K or Q
  MISC_FEATURE (43)..(43): X is  T, E, A or Q
  MISC_FEATURE (45)..(45): X is  T, E, K or Q
  MISC_FEATURE (46)..(46): X is   E, N, K or R
  MISC_FEATURE (47)..(47): X is S, D, Q, or N
  MISC_FEATURE (49)..(49): X is S, Q, or K
XXXIAXXXAXXXAXXXXALXXXGXXXXXIAXXXAXXXXXXXXXLXXXGXS

SEQ ID NO: 39 - protein, 50 aa, Artificial Sequence
  Synthetic
  MISC_FEATURE (1)..(1): X is Y, S, D, or E
  MISC_FEATURE (2)..(2): X is E, D or R
  MISC_FEATURE (3)..(3): X is V, E, Q, or T
  MISC_FEATURE (5)..(5): X is K, R, D or Q
  MISC_FEATURE (6)..(6): X is K, E or H
  MISC_FEATURE (7)..(7): X is I or V
  MISC_FEATURE (8)..(8): X is L, I or V
  MISC_FEATURE (9)..(9): X is Q, R, E or T
  MISC_FEATURE (10)..(10): X is Q, R, E or A
  MISC_FEATURE (11)..(11): X is I, V or A
  MISC_FEATURE (12)..(12): X is K, I, V or A
  MISC_FEATURE (13)..(13): X is E, R, K, or N
  MISC_FEATURE (14)..(14): X is E, R, K, or A
  MISC_FEATURE (15)..(15): X is I or V
  MISC_FEATURE (16)..(16): X is I, E, K or V
  MISC_FEATURE (17)..(17): X is E, K or R
  MISC_FEATURE (20)..(20): X is Q, E, K or R
  MISC_FEATURE (21)..(21): X is  E, K or R
  MISC_FEATURE (22)..(22): X is  S, E, N or T
  MISC_FEATURE (24)..(24): X is V or T
  MISC_FEATURE (25)..(25): X is S or D
  MISC_FEATURE (26)..(26): X is E, P or S
  MISC_FEATURE (27)..(27): X is E or D
  MISC_FEATURE (28)..(28): X is E, Q, L or K
  MISC_FEATURE (30)..(30): X is E, N, R or K
  MISC_FEATURE (31)..(31): X is E, R or K
  MISC_FEATURE (32)..(32): X is I or V
  MISC_FEATURE (33)..(33): X is E, A, S or V
  MISC_FEATURE (34)..(34): X is R, K or Q
  MISC_FEATURE (35)..(35): X is R, I, H or Q
  MISC_FEATURE (36)..(36): X is I or V
  MISC_FEATURE (37)..(37): X is K, Q, R or E
  MISC_FEATURE (38)..(38): X is S, E, K, or D
  MISC_FEATURE (39)..(39): X is R, E, K, or V
  MISC_FEATURE (40)..(40): X is V, I, A or T
  MISC_FEATURE (41)..(41): X is E, K or R
  MISC_FEATURE (42)..(42): X is E, K or R
  MISC_FEATURE (43)..(43): X is T, E, A or Q
  MISC_FEATURE (44)..(44): X is L, K, N  or Q
  MISC_FEATURE (45)..(45): X is R, K, N or E
  MISC_FEATURE (46)..(46): X is R, K, D or E
  MISC_FEATURE (47)..(47): X is S, Q, D or N
  MISC_FEATURE (49)..(49): X is S, K, Q or E
  MISC_FEATURE (50)..(50): X is S, D, N or P
XXXIXXXXXXXXXXXXXALXXXGXXXXXIXXXXXXXXXXXXXXXXXXGXX

SEQ ID NO: 40 - protein, 51 aa, Artificial Sequence
  Synthetic
SYEDEAEEKARRVAEKVERLKRSGTSEDEIAEEVAREISEVIRTLKESGSS

SEQ ID NO: 41 - protein, 50 aa, Artificial Sequence
  Synthetic
YEVIAEIVARIVAEIVEALKRSGTSEDEIAEIVARVISEVIRTLKESGSS

SEQ ID NO: 42 - protein, 50 aa, Artificial Sequence
  Synthetic
YEVIKEIVQRIVEEIVEALKRSGTSEDEINEIVRRVKSEVERTLKESGSS

SEQ ID NO: 43 - protein, 50 aa, Artificial Sequence
  Synthetic
  MISC_FEATURE (1)..(1): X is S or T
  MISC_FEATURE (2)..(2): X is S, D or E
  MISC_FEATURE (3)..(3): X is K, T, D or E
  MISC_FEATURE (4)..(4): X is K, A or S
  MISC_FEATURE (5)..(5): X is K, or E
  MISC_FEATURE (6)..(6): X is K, N, Ror E
  MISC_FEATURE (7)..(7): X is L, I or T
  MISC_FEATURE (8)..(8): X is R, A, K or Q
  MISC_FEATURE (9)..(9): X is K, E, R,  or N
  MISC_FEATURE (10)..(10): X is K, E, or R
  MISC_FEATURE (11)..(11): X is L or I
  MISC_FEATURE (12)..(12): X is V or I
  MISC_FEATURE (14)..(14): X is K, T or I
  MISC_FEATURE (16)..(16): X is V, A  or K
  MISC_FEATURE (17)..(17): X is E or K
  MISC_FEATURE (18)..(18): X is N, A or L
  MISC_FEATURE (20)..(20): X is K, Q, E or R
  MISC_FEATURE (21)..(21): X is K, E or R
  MISC_FEATURE (22)..(22): X is K, Q, N or R
  MISC_FEATURE (24)..(24): X is D, E, Q or W
  MISC_FEATURE (25)..(25): X is D, or N
  MISC_FEATURE (26)..(26): X is T, E, K or D
  MISC_FEATURE (27)..(27): X is E, S or D
  MISC_FEATURE (28)..(28): X is E, K, T or D
  MISC_FEATURE (30)..(30): X is R, A, K or E
  MISC_FEATURE (31)..(31): X is R, D, K or E
  MISC_FEATURE (32)..(32): X is D or A
  MISC_FEATURE (34)..(34): X is R, K, or E
  MISC_FEATURE (35)..(35): X is K or E
  MISC_FEATURE (37)..(37): X is F, V, W or A
  MISC_FEATURE (38)..(38): X is E, K, or R
  MISC_FEATURE (39)..(39): X is L, I or R
  MISC_FEATURE (40)..(40): X is V, I or A
  MISC_FEATURE (41)..(41): X is R, E, K or Q
  MISC_FEATURE (42)..(42): X is R, E, K or Q
  MISC_FEATURE (44)..(44): X is A or L
  MISC_FEATURE (45)..(45): X is E, K, R or D
  MISC_FEATURE (46)..(46): X is E, K, R or D
  MISC_FEATURE (47)..(47): X is A or S
  MISC_FEATURE (49)..(49): X is I or L
XXXXXXXXXXXXKXVXXXAXXXGXXXXXAXXXAXXAXXXXXXAXXXXGXD

SEQ ID NO: 44 - protein, 50 aa, Artificial Sequence
  Synthetic
  MISC_FEATURE (1)..(1): X is S or T
  MISC_FEATURE (2)..(2): X is S, K, N or T
  MISC_FEATURE (3)..(3): X is E, K, D or T
  MISC_FEATURE (4)..(4): X is V or A
  MISC_FEATURE (5)..(5): X is L, I, V or A
  MISC_FEATURE (6)..(6): X is E, K or Q
  MISC_FEATURE (7)..(7): X is L, I or T
  MISC_FEATURE (8)..(8): X is A or V
  MISC_FEATURE (9)..(9): X is A or I
  MISC_FEATURE (10)..(10): X is R, K or E
  MISC_FEATURE (11)..(11): X is L or I
  MISC_FEATURE (12)..(12): X is V or I
  MISC_FEATURE (14)..(14): X is E, K or I
  MISC_FEATURE (16)..(16): X is V or A
  MISC_FEATURE (18)..(18): X is N, L or A
  MISC_FEATURE (20)..(20): X is Q, W or A
  MISC_FEATURE (22)..(22): X is E, Q, K or N
  MISC_FEATURE (24)..(24): X is E, Q, or Y
  MISC_FEATURE (25)..(25): X is D or N
  MISC_FEATURE (26)..(26): X is I or V
  MISC_FEATURE (27)..(27): X is S, A or T
  MISC_FEATURE (28)..(28): X is E, K or D
  MISC_FEATURE (31)..(31): X is R, E, K or Q
  MISC_FEATURE (32)..(32): X is A or D
  MISC_FEATURE (35)..(35): X is E, R or D
  MISC_FEATURE (37)..(37): X is F, V, A or W
  MISC_FEATURE (38)..(38): X is K, E, A or Q
  MISC_FEATURE (39)..(39): X is R, I or Q
  MISC_FEATURE (40)..(40): X is V, I or A
  MISC_FEATURE (42)..(42): X is E, Q or R
  MISC_FEATURE (44)..(44): X is A or L
  MISC_FEATURE (45)..(45): X is K, E or H
  MISC_FEATURE (46)..(46): X is K, E, R or H
  MISC_FEATURE (49)..(49): X is I, L or D
  MISC_FEATURE (50)..(50): X is T, V, D or K
XXXXXXXXXXXXKXVXEXAXRXGXXXXXAAXXAAXAXXXXAXAXXXAGXX

SEQ ID NO: 45 - protein, 49 aa, Artificial Sequence
  Synthetic
  MISC_FEATURE (1)..(1): X is S or T
  MISC_FEATURE (2)..(2): X is S, K, W or T
  MISC_FEATURE (3)..(3): X is E, D, S, or K
  MISC_FEATURE (4)..(4): X is T, A, D, or R
  MISC_FEATURE (5)..(5): X is L, I, A, or V
  MISC_FEATURE (6)..(6): X is K, E or R
  MISC_FEATURE (7)..(7): X is K, E, D or R
  MISC_FEATURE (8)..(8): X is A or V
  MISC_FEATURE (9)..(9): X is A or I
  MISC_FEATURE (10)..(10): X is E, K or D
  MISC_FEATURE (11)..(11): X is E, K, H or D
  MISC_FEATURE (12)..(12): X is I or V
  MISC_FEATURE (13)..(13): X is R or VK
  MISC_FEATURE (14)..(14): X is K, E, Q or R
  MISC_FEATURE (15)..(15): X is E or R
  MISC_FEATURE (16)..(16): X is V or A
  MISC_FEATURE (17)..(17): X is E, K or Q
  MISC_FEATURE (18)..(18): X is E, K, R or T
  MISC_FEATURE (20)..(20): X is Q, A or L
  MISC_FEATURE (21)..(21): X is R, K, E or D
  MISC_FEATURE (22)..(22): X is E, K, or Q
  MISC_FEATURE (24)..(24): X is N, E, R, or Q
  MISC_FEATURE (25)..(25): X is D, N, or T
  MISC_FEATURE (26)..(26): X is I or V
  MISC_FEATURE (27)..(27): X is S, A, or T
  MISC_FEATURE (28)..(28): X is E, D, Q, or K
  MISC_FEATURE (31)..(31): X is R, E, Q, or K
  MISC_FEATURE (32)..(32): X is R, E, Q, or D
  MISC_FEATURE (35)..(35): X is R, E, or K
  MISC_FEATURE (36)..(36): X is R, Q, E, or K
  MISC_FEATURE (37)..(37): X is F, V, A or W
  MISC_FEATURE (38)..(38): X is R, K, E or A
  MISC_FEATURE (39)..(39): X is R, K, or E
  MISC_FEATURE (40)..(40): X is R, K, D or E
  MISC_FEATURE (42)..(42): X is E, K or Q
  MISC_FEATURE (43)..(43): X is E, K, R or N
  MISC_FEATURE (44)..(44): X is L, R or A
  MISC_FEATURE (45)..(45): X is K, H, E or R
  MISC_FEATURE (46)..(46): X is R, K, E or Q
  MISC_FEATURE (47)..(47): X is R, K, or  E
  MISC_FEATURE (49)..(49): X is D, N, Q or K
XXXXXXXXXXXXXXXXXXAXXXGXXXXXAAXXAAXXXXXXAXXXXXXGX

SEQ ID NO: 46 - protein, 50 aa, Artificial Sequence
  Synthetic
SSEKEELRERLVKIVVENAKRKGDDTEEAREAAREAFELVREAAERAGID

SEQ ID NO: 47 - protein, 50 aa, Artificial Sequence
  Synthetic
SSEVLELAIRLIKEVVENAQREGYDISEAARAAAEAFKRVAEAAKRAGIT

SEQ ID NO: 48 - protein, 49 aa, Artificial Sequence
  Synthetic
SSETLKRAIEEIRKRVEEAQREGNDISEAARQAAEEFRKKAEELKRRGD

SEQ ID NO: 49 - protein, 37 aa, Artificial Sequence
  Synthetic
  MISC_FEATURE (1)..(1): X is D or N
  MISC_FEATURE (2)..(2): X is D, S or T
  MISC_FEATURE (3)..(3): X is E, T, D or Q
  MISC_FEATURE (4)..(4): X is E, or  D
  MISC_FEATURE (5)..(5): X is Q, K, E, or T
  MISC_FEATURE (6)..(6): X is C or A
  MISC_FEATURE (7)..(7): X is R, K or I
  MISC_FEATURE (8)..(8): X is K or E
  MISC_FEATURE (11)..(11): X is R, K or E
  MISC_FEATURE (12)..(12): X is K, Q, E or N
  MISC_FEATURE (14)..(15): X is K, Q, or R
  MISC_FEATURE (16)..(16): X is T, K, D or R
  MISC_FEATURE (17)..(17): X is Y, S, A or R
  MISC_FEATURE (18)..(18): X is T, S, or D
  MISC_FEATURE (19)..(19): X is T, N, or D
  MISC_FEATURE (20)..(20): X is D, P, K, or E
  MISC_FEATURE (21)..(21): X is E, D, K or Q
  MISC_FEATURE (22)..(22): X is E, A, K or Q
  MISC_FEATURE (25)..(25): X is R, K, A or E
  MISC_FEATURE (26)..(26): X is I, E, L or Y
  MISC_FEATURE (29)..(29): X is E, K or R
  MISC_FEATURE (30)..(30): X is E or A
  MISC_FEATURE (32)..(32): X is R, K, H or Q
  MISC_FEATURE (33)..(33): X is R, K or Q
  MISC_FEATURE (34)..(34): X is T, E, Q, or R
  MISC_FEATURE (37)..(37): X is D or N
XXXXXXXXIAXXAXXXXXXXXXIAXXIAXXAXXXTTX

SEQ ID NO: 50 - protein, 36 aa, Artificial Sequence
  Synthetic
  MISC_FEATURE (1)..(1): X is D, P, or K
  MISC_FEATURE (2)..(2): X is E, T or D
  MISC_FEATURE (3)..(3): X is E, or R
  MISC_FEATURE (5)..(5): X is C or A
  MISC_FEATURE (6)..(6): X is R, K, or E
  MISC_FEATURE (7)..(7): X is C, L or I
  MISC_FEATURE (10)..(10): X is E, R or I
  MISC_FEATURE (13)..(13): X is K, R or Q
  MISC_FEATURE (14)..(14): X is E, R or Q
  MISC_FEATURE (16)..(16): X is Y, A, S, or R
  MISC_FEATURE (17)..(17): X is T, D, E, or S
  MISC_FEATURE (18)..(18): X is T, D, N, or S
  MISC_FEATURE (19)..(19): X is D, P, K or E
  MISC_FEATURE (20)..(20): X is E, Q, D or T
  MISC_FEATURE (21)..(21): X is E, D, K or N
  MISC_FEATURE (24)..(24): X is R, A or K
  MISC_FEATURE (25)..(25): X is I, L or V
  MISC_FEATURE (28)..(28): X is Y, A, E  or I
  MISC_FEATURE (31)..(31): X is R, K, H  or Q
  MISC_FEATURE (32)..(32): X is R, K, or Q
  MISC_FEATURE (33)..(33): X is T or Q
  MISC_FEATURE (36)..(36): X is D or N
XXXIXXXIAXAAXXTXXXXXXIAXXIAXAAXXXTTX

SEQ ID NO: 51 - protein, 36 aa, Artificial Sequence
  Synthetic
  MISC_FEATURE (1)..(1): X is D, P, E or S
  MISC_FEATURE (2)..(2): X is E, D, K or N
  MISC_FEATURE (5)..(5): X is E, R, K or D
  MISC_FEATURE (6)..(6): X is R or K
  MISC_FEATURE (7)..(7): X is C, L or I
  MISC_FEATURE (9)..(9): X is E or K
  MISC_FEATURE (10)..(10): X is E, I or Q
  MISC_FEATURE (13)..(13): X is K or R
  MISC_FEATURE (14)..(14): X is Q, K or E
  MISC_FEATURE (16)..(16): X is Y, S ,A or R
  MISC_FEATURE (17)..(17): X is T, S  or D
  MISC_FEATURE (18)..(18): X is T, S, N  or D
  MISC_FEATURE (19)..(19): X is D, P, E or Q
  MISC_FEATURE (20)..(20): X is D, E or N
  MISC_FEATURE (21)..(21): X is D, E, K or N
  MISC_FEATURE (23)..(23): X is E, K, R or D
  MISC_FEATURE (24)..(24): X is E, K, R or Q
  MISC_FEATURE (25)..(25): X is I, L or V
  MISC_FEATURE (26)..(26): X is K or I
  MISC_FEATURE (27)..(27): X is E, K or D
  MISC_FEATURE (28)..(28): X is Y, I, E or A
  MISC_FEATURE (30)..(30): X is R, E, K or D
  MISC_FEATURE (31)..(31): X is R, E, or K
  MISC_FEATURE (32)..(32): X is Q, E, K or R
  MISC_FEATURE (33)..(33): X is T, Q or S
  MISC_FEATURE (36)..(36): X is D or N
XXEIXXXIXXAAXXTXXXXXXIXXXXXXAXXXXTTX

SEQ ID NO: 52 - protein, 37 aa, Artificial Sequence
  Synthetic
DDEEQCREIAEKAKQTYTDDEEIARIIAEAARQTTTD

SEQ ID NO: 53 - protein, 36 aa, Artificial Sequence
  Synthetic
DEEICRCIAEAAKQTYTDDEEIARIIAYAARQTTTD

SEQ ID NO: 54 - protein, 36 aa, Artificial Sequence
  Synthetic
DEEIERCIEEAAKQTYTDDEEIERIKEYARRQTTTD

SEQ ID NO: 55 - protein, 37 aa, Artificial Sequence
  Synthetic
  MISC_FEATURE (1)..(1): X is N, S or D
  MISC_FEATURE (2)..(2): X is A, S, T or D
  MISC_FEATURE (3)..(3): X is A, S, T or E
  MISC_FEATURE (4)..(4): X is D, K or E
  MISC_FEATURE (5)..(5): X is D, K, N or E
  MISC_FEATURE (7)..(7): X is R, A, Y, or L
  MISC_FEATURE (8)..(8): X is E or K
  MISC_FEATURE (9)..(9): X is V, Q, E or K
  MISC_FEATURE (11)..(11): X is R, Q, E or K
  MISC_FEATURE (12)..(12): X is T, Q, E or K
  MISC_FEATURE (14)..(14): X is Q, E or K
  MISC_FEATURE (15)..(15): X is D, K, R or N
  MISC_FEATURE (16)..(16): X is E, K, Q or D
  MISC_FEATURE (18)..(18): X is S, T, V, or L
  MISC_FEATURE (19)..(19): X is P, S, or D
  MISC_FEATURE (20)..(20): X is E, P, T, or R
  MISC_FEATURE (21)..(21): X is E, S, T, or R
  MISC_FEATURE (22)..(22): X is E or K
  MISC_FEATURE (25)..(25): X is R, A, E or L
  MISC_FEATURE (26)..(26): X is Q, K, E, or N
  MISC_FEATURE (27)..(27): X is V or L
  MISC_FEATURE (29)..(29): X is K, E, Q, or R
  MISC_FEATURE (30)..(30): X is K, E, Q, or D
  MISC_FEATURE (32)..(32): X is K, E, or N
  MISC_FEATURE (33)..(33): X is K, E, R or N
  MISC_FEATURE (34)..(34): X is K, E, R or Q
  MISC_FEATURE (36)..(36): X is S or V
  MISC_FEATURE (37)..(37): X is S, N or d
XXXXXAXXXLXXLXXXGXXXXXAAXXXLXXLXXXGXX

SEQ ID NO: 56 - protein, 36 aa, Artificial Sequence
  Synthetic
  MISC_FEATURE (1)..(1): X is A, T, R, or E
  MISC_FEATURE (2)..(2): X is S, T, I, or E
  MISC_FEATURE (3)..(3): X is D, E, K, or Q
  MISC_FEATURE (6)..(6): X is R, A, Y or L
  MISC_FEATURE (7)..(7): X is  A, I or L
  MISC_FEATURE (10)..(10): X is  K, E, R or V
  MISC_FEATURE (13)..(13): X is  K, Q, R or N
  MISC_FEATURE (14)..(14): X is  D, K, Q, or R
  MISC_FEATURE (15)..(15): X is  E, S, Q, or R
  MISC_FEATURE (17)..(17): X is  S, T, V or H
  MISC_FEATURE (18)..(18): X is  P, D or S
  MISC_FEATURE (19)..(19): X is  P, E or T
  MISC_FEATURE (20)..(20): X is K, E, S or T
  MISC_FEATURE (21)..(21): X is E or Q
  MISC_FEATURE (24)..(24): X is R, A or L
  MISC_FEATURE (25)..(25): X is I, A, Q or L
  MISC_FEATURE (26)..(26): X is V or L
  MISC_FEATURE (28)..(28): X is K, E, Q or R
  MISC_FEATURE (31)..(31): X is K, E, or N
  MISC_FEATURE (32)..(32): X is R, Q, E, or N
  MISC_FEATURE (33)..(33): X is T, Q, E, or N
  MISC_FEATURE (35)..(35): X is S or V
  MISC_FEATURE (36)..(36): X is N, D, or S
XXXAAXXVLXALXXXGXXXXXAAXXXLXALXXXGXX

SEQ ID NO: 57 - protein, 36 aa, Artificial Sequence
  Synthetic
  MISC_FEATURE (1)..(1): X is E, T, S or K
  MISC_FEATURE (2)..(2): X is E, T, S or D
  MISC_FEATURE (3)..(3): X is E, K, Q or D
  MISC_FEATURE (5)..(5): X is S, K, or A
  MISC_FEATURE (6)..(6): X is R, K, or E
  MISC_FEATURE (7)..(7): X is A, K, or I
  MISC_FEATURE (9)..(9): X is L, E, or W
  MISC_FEATURE (10)..(10): X is K, R , Q or E
  MISC_FEATURE (13)..(13): X is K, R , Q or E
  MISC_FEATURE (14)..(14): X is D, N , Q or E
  MISC_FEATURE (15)..(15): X is S, H, Q or E
  MISC_FEATURE (17)..(17): X is S, V, T or K
  MISC_FEATURE (18)..(18): X is P, S, or D
  MISC_FEATURE (19)..(19): X is P, E, or R
  MISC_FEATURE (20)..(20): X is E or D
  MISC_FEATURE (21)..(21): X is E, K or R
  MISC_FEATURE (23)..(23): X is N, K or R
  MISC_FEATURE (24)..(24): X is E, K or R
  MISC_FEATURE (25)..(25): X is A, I, L or Q
  MISC_FEATURE (26)..(26): X is V or A
  MISC_FEATURE (27)..(27): X is E, K, D, or R
  MISC_FEATURE (28)..(28): X is E, K, D, or R
  MISC_FEATURE (30)..(30): X is E, L, or Q
  MISC_FEATURE (31)..(31): X is E, N, K or R
  MISC_FEATURE (32)..(32): X is Q, N, K or R
  MISC_FEATURE (33)..(33): X is E, N, T or H
  MISC_FEATURE (35)..(35): X is S, K, Q or H
  MISC_FEATURE (36)..(36): X is N, D, or R
XXXAXXXVXXALXXXGXXXXXAXXXXXXAXXXXGXX

SEQ ID NO: 58 - protein, 37 aa, Artificial Sequence
  Synthetic
NAEDKAREVLKELKDEGSPEEEAARQVLKDLNREGSN

SEQ ID NO: 59 - protein, 36 aa, Artificial Sequence
  Synthetic
AEDAARAVLKALKDEGSPEEEAARAVLKALNREGSN

SEQ ID NO: 60 - protein, 36 aa, Artificial Sequence
  Synthetic
EEDASRAVLKALKDEGSPEEEARRAVEKALNREGSN

SEQ ID NO: 61 - protein, 41 aa, Artificial Sequence
  Synthetic
  MISC_FEATURE (1)..(2): X is D, N, S, or T
  MISC_FEATURE (3)..(4): X is D or E
  MISC_FEATURE (5)..(5): X is V, I or E
  MISC_FEATURE (6)..(6): X is R, N, K or E
  MISC_FEATURE (7)..(7): X is D, N, K or E
  MISC_FEATURE (8)..(8): X is R, N, K or E
  MISC_FEATURE (9)..(9): X is V or I
  MISC_FEATURE (10)..(10): X is K, E, R or D
  MISC_FEATURE (11)..(11): X is K, E, R or Q
  MISC_FEATURE (12)..(12): X is K, R or L
  MISC_FEATURE (14)..(14): X is K or E
  MISC_FEATURE (15)..(15): X is K, R or E
  MISC_FEATURE (17)..(17): X is K, or Q
  MISC_FEATURE (18)..(18): X is K, Eor R
  MISC_FEATURE (21)..(21): X is D, N or S
  MISC_FEATURE (22)..(22): X is K, R, T or P
  MISC_FEATURE (23)..(23): X is E, D, S or K
  MISC_FEATURE (24)..(24): X is E, L or K
  MISC_FEATURE (25)..(25): X is V or I
  MISC_FEATURE (26)..(26): X is K, R, E or I
  MISC_FEATURE (27)..(27): X is K, R, or E
  MISC_FEATURE (28)..(28): X is I or L
  MISC_FEATURE (29)..(29): X is V, A or L
  MISC_FEATURE (30)..(30): X is K, E or R
  MISC_FEATURE (31)..(31): X is K, E or T
  MISC_FEATURE (32)..(32): X is L or I
  MISC_FEATURE (33)..(33): X is A, R or Q
  MISC_FEATURE (34)..(34): X is E,K, R or N
  MISC_FEATURE (35)..(35): X is E, R or L
  MISC_FEATURE (37)..(37): X is K, Q, S or E
  MISC_FEATURE (38)..(38): X is K, Q, or R
  MISC_FEATURE (39)..(39): X is S or A
  MISC_FEATURE (40)..(40): X is T, N, S or Q
  MISC_FEATURE (41)..(41): X is T, N, S or D
XXXXXXXXXXXXAXXAXXATXXXXXXXXXXXXXXXAXXXXX

SEQ ID NO: 62 - protein, 40 aa, Artificial Sequence
  Synthetic
  MISC_FEATURE (1)..(1): X is S, D, E or N
  MISC_FEATURE (2)..(2): X is E, D, K, or N
  MISC_FEATURE (3)..(3): X is L or A
  MISC_FEATURE (4)..(4): X is V or I
  MISC_FEATURE (5)..(5): X is N, K, R or L
  MISC_FEATURE (6)..(6): X is E, K or Q
  MISC_FEATURE (7)..(7): X is A or I
  MISC_FEATURE (8)..(8): X is V or I
  MISC_FEATURE (9)..(9): X is K, R, E, or Q
  MISC_FEATURE (10)..(10): X is L, A or Q
  MISC_FEATURE (11)..(11): X is L or V
  MISC_FEATURE (16)..(16): X is K or R
  MISC_FEATURE (17)..(17): X is E or Q
  MISC_FEATURE (20)..(20): X is C, N or S
  MISC_FEATURE (21)..(21): X is K, R, E, or P
  MISC_FEATURE (22)..(22): X is D, R, E, or S
  MISC_FEATURE (24)..(24): X is V or I
  MISC_FEATURE (25)..(25): X is R, E, H or I
  MISC_FEATURE (26)..(26): X is R, E, K or Y
  MISC_FEATURE (27)..(27): X is I or L
  MISC_FEATURE (28)..(28): X is V, A or L
  MISC_FEATURE (29)..(29): X is K, R, E, or D
  MISC_FEATURE (30)..(30): X is I, A, or L
  MISC_FEATURE (31)..(31): X is I, or L
  MISC_FEATURE (32)..(32): X is A, E, or R
  MISC_FEATURE (33)..(33): X is E, Q, N or K
  MISC_FEATURE (36)..(36): X is E, R or K
  MISC_FEATURE (37)..(37): X is Q, K, E, or D
  MISC_FEATURE (38)..(38): X is S or A
  MISC_FEATURE (39)..(39): X is T, Q, N, or S
  MISC_FEATURE (40)..(40): X is T, D, N, or S
XXXXXXXXXXXAEVAXXATXXXLXXXXXXXXXXLAXXXXX

SEQ ID NO: 63 - protein, 40 aa, Artificial Sequence
  Synthetic
  MISC_FEATURE (1)..(1): X is S, D, E or P
  MISC_FEATURE (2)..(2): X is K, D, E or R
  MISC_FEATURE (3)..(3): X is L or A
  MISC_FEATURE (4)..(4): X is V, I, or Q
  MISC_FEATURE (5)..(5): X is N, K, Q, or E
  MISC_FEATURE (6)..(6): X is R, D, H or E
  MISC_FEATURE (7)..(7): X is I or A
  MISC_FEATURE (8)..(8): X is V, I or E
  MISC_FEATURE (9)..(9): X is K, Q or E
  MISC_FEATURE (10)..(10): X is L, A, Q or E
  MISC_FEATURE (11)..(11): X is L or V
  MISC_FEATURE (12)..(12): X is E, Q, K, or R
  MISC_FEATURE (13)..(13): X is E, K, or R
  MISC_FEATURE (15)..(15): X is A, Q, K, or R
  MISC_FEATURE (16)..(16): X is K, D or E
  MISC_FEATURE (17)..(17): X is Q or E
  MISC_FEATURE (20)..(20): X is D, N or S
  MISC_FEATURE (21)..(21): X is D, K, E or P
  MISC_FEATURE (22)..(22): X is D, K, E or N
  MISC_FEATURE (24)..(24): X is V, Q, I, or R
  MISC_FEATURE (25)..(25): X is E, K or R
  MISC_FEATURE (26)..(26): X is H, E, Q,  or R
  MISC_FEATURE (27)..(27): X is I or L
  MISC_FEATURE (28)..(28): X is E, N, or Q
  MISC_FEATURE (29)..(29): X is K, E or R
  MISC_FEATURE (30)..(30): X is I, A or L
  MISC_FEATURE (31)..(31): X is I, R or L
  MISC_FEATURE (32)..(32): X is E, R or K
  MISC_FEATURE (33)..(33): X is E, N, Q or K
  MISC_FEATURE (35)..(35): X is Q or K
  MISC_FEATURE (36)..(36): X is R or K
  MISC_FEATURE (37)..(37): X is R, S, E or Q
  MISC_FEATURE (38)..(38): X is S, A, L, or R
  MISC_FEATURE (39)..(39): X is T, N, or Q
  MISC_FEATURE (40)..(40): X is D, K, N or S
XXXXXXXXXXXXXVXXXATXXXLXXXXXXXXXXLXXXXXX

SEQ ID NO: 64 - protein, 41 aa, Artificial Sequence
  Synthetic
DSEEVNERVKQLAEKAKEATDKEEVIEIVKELAELAKQSTD

SEQ ID NO: 65 - protein, 40 aa, Artificial Sequence
  Synthetic
SELVNEIVKQLAEVAKEATDKELVIYIVKILAELAKQSTD

SEQ ID NO: 66 - protein, 40 aa, Artificial Sequence
  Synthetic
SELVNEIVKQLEEVAKEATDKELVEHIEKILEELKKQSTD

SEQ ID NO: 67 - protein, 47 aa, Artificial Sequence
  Synthetic
  MISC_FEATURE (1)..(1): X is N, D, or S
  MISC_FEATURE (2)..(2): X is D or S
  MISC_FEATURE (3)..(3): X is D or E
  MISC_FEATURE (4)..(4): X is R, T, N or E
  MISC_FEATURE (5)..(5): X is K, Q, E, or D
  MISC_FEATURE (6)..(6): X is K, E, or R
  MISC_FEATURE (7)..(7): X is Q or L
  MISC_FEATURE (8)..(9): X is R, E, K or Q
  MISC_FEATURE (10)..(10): X is R, E, K or I
  MISC_FEATURE (11)..(11): X is V or A
  MISC_FEATURE (12)..(12): X is R or E
  MISC_FEATURE (13)..(13): X is K, D or E
  MISC_FEATURE (15)..(15): X is A or W
  MISC_FEATURE (16)..(16): X is E, K, or R
  MISC_FEATURE (17)..(17): X is E, K, D or R
  MISC_FEATURE (20)..(20): X is S, K, N or Q
  MISC_FEATURE (21)..(21): X is R, K, N or Q
  MISC_FEATURE (22)..(22): X is A or L
  MISC_FEATURE (23)..(23): X is T, E or N
  MISC_FEATURE (24)..(24): X is D, S or N
  MISC_FEATURE (25)..(25): X is E, D, S or P
  MISC_FEATURE (26)..(26): X is E, D, or Q
  MISC_FEATURE (27)..(27): X is L or A
  MISC_FEATURE (28)..(28): X is I, R or A
  MISC_FEATURE (29)..(29): X is K, D, E, or Q
  MISC_FEATURE (30)..(30): X is E, Q, L, or R
  MISC_FEATURE (31)..(31): X is I or A
  MISC_FEATURE (32)..(32): X is K or Q
  MISC_FEATURE (33)..(33): X is K, E or R
  MISC_FEATURE (34)..(34): X is C or A
  MISC_FEATURE (36)..(36): X is K, E or Q
  MISC_FEATURE (37)..(37): X is L, R, K, or E
  MISC_FEATURE (38)..(38): X is A or W
  MISC_FEATURE (39)..(39): X is E, K, N, or Q
  MISC_FEATURE (40)..(40): X is E, K, D, or Q
  MISC_FEATURE (43)..(43): X is E, K, N, or S
  MISC_FEATURE (44)..(44): X is R, K, Q, or D
  MISC_FEATURE (45)..(45): X is S or A
  MISC_FEATURE (47)..(47): X is N, D, or S
XXXXXXXXXXXXXLXXXLAXXXXXXXXXXXXXXXAXXXXXLAXXXTX

SEQ ID NO: 68 - protein, 46 aa, Artificial Sequence
  Synthetic
  MISC_FEATURE (1)..(1): X is D or P
  MISC_FEATURE (2)..(2): X is E, T, or R
  MISC_FEATURE (3)..(3): X is L or I
  MISC_FEATURE (5)..(5): X is K, R or N
  MISC_FEATURE (6)..(6): X is Q, L, A or E
  MISC_FEATURE (7)..(7): X is I or A
  MISC_FEATURE (9)..(9): X is E, I or K
  MISC_FEATURE (10)..(10): X is V or A
  MISC_FEATURE (12)..(12): X is K, I or L
  MISC_FEATURE (15)..(15): X is F, A, or N
  MISC_FEATURE (16)..(16): X is E or K
  MISC_FEATURE (19)..(19): X is S, Q or R
  MISC_FEATURE (20)..(20): X is K, N, E or R
  MISC_FEATURE (21)..(21): X is A or L
  MISC_FEATURE (24)..(24): X is E or P
  MISC_FEATURE (25)..(25): X is E, N, or R
  MISC_FEATURE (26)..(26): X is L or A
  MISC_FEATURE (27)..(27): X is I or A
  MISC_FEATURE (28)..(28): X is K or E
  MISC_FEATURE (29)..(29): X is L, Q or E
  MISC_FEATURE (30)..(30): X is I or A
  MISC_FEATURE (32)..(32): X is K, E, or R
  MISC_FEATURE (33)..(34): X is C or A
  MISC_FEATURE (35)..(35): X is K, S, or Q
  MISC_FEATURE (36)..(36): X is L or E
  MISC_FEATURE (37)..(37): X is A or W
  MISC_FEATURE (38)..(38): X is A or F
  MISC_FEATURE (39)..(39): X is E or K
  MISC_FEATURE (43)..(43): X is R or K
  MISC_FEATURE (44)..(44): X is S or A
  MISC_FEATURE (46)..(46): X is N or D
XXXIXXXLXXAXLAXXLAXXXTDXXXXXXXLXXXXXXXXLASXXTX

SEQ ID NO: 69 - protein, 46 aa, Artificial Sequence
  Synthetic
  MISC_FEATURE (1)..(1): X is D or P
  MISC_FEATURE (2)..(2): X is E, D, K, or N
  MISC_FEATURE (3)..(3): X is E, D, or K
  MISC_FEATURE (5)..(5): X is R, A, I or K
  MISC_FEATURE (6)..(6): X is Q, R, E, or K
  MISC_FEATURE (7)..(7): X is I or A
  MISC_FEATURE (9)..(9): X is E, K, Q, or R
  MISC_FEATURE (10)..(10): X is T, E, K or I
  MISC_FEATURE (12)..(12): X is L, K or I
  MISC_FEATURE (13)..(13): X is E, K or R
  MISC_FEATURE (15)..(15): X is F, A or N
  MISC_FEATURE (16)..(16): X is E, K or Q
  MISC_FEATURE (17)..(17): X is R, K, D or E
  MISC_FEATURE (19)..(19): X is S, E, K or Q
  MISC_FEATURE (20)..(20): X is R, N, K or D
  MISC_FEATURE (21)..(21): X is A, L or I
  MISC_FEATURE (22)..(22): X is T, D or E
  MISC_FEATURE (23)..(23): X is T, D or S
  MISC_FEATURE (24)..(24): X is P, E, D or S
  MISC_FEATURE (25)..(25): X is N, E, D or K
  MISC_FEATURE (26)..(26): X is E or K
  MISC_FEATURE (27)..(27): X is I, A or R
  MISC_FEATURE (28)..(28): X is K, E, or S
  MISC_FEATURE (29)..(29): X is K, E, or R
  MISC_FEATURE (30)..(30): X is I or A
  MISC_FEATURE (32)..(33): X is K, E or R
  MISC_FEATURE (34)..(34): X is C or A
  MISC_FEATURE (35)..(35): X is Q or E
  MISC_FEATURE (36)..(36): X is K, R, Q or E
  MISC_FEATURE (37)..(37): X is K, R, N or E
  MISC_FEATURE (38)..(38): X is F or A
  MISC_FEATURE (39)..(39): X is E, K, or R
  MISC_FEATURE (40)..(40): X is D, E, K, or R
  MISC_FEATURE (41)..(41): X is K, D, N, or S
  MISC_FEATURE (42)..(42): X is  N, or S
  MISC_FEATURE (43)..(43): X is  R,K, Q,  or D
  MISC_FEATURE (44)..(44): X is  S, K or N
  MISC_FEATURE (46)..(46): X is  S, D or N
XXXIXXXLXXAXXAXXXAXXXXXXXXXXXXLXXXXXXXXXXXXXTX

SEQ ID NO: 70 - protein, 47 aa, Artificial Sequence
  Synthetic
NDERQKQREEVRKLAEELASKATDEELIKEIKKCAQLAEELASRSTN

SEQ ID NO: 71 - protein, 46 aa, Artificial Sequence
  Synthetic
DELIKQILEVAKLAFELASKATDEELIKEILKCCQLAFELASRSTN

SEQ ID NO: 72 - protein, 46 aa, Artificial Sequence
  Synthetic
DEEIKQILETAKEAFERASKATDEEEIKEILKKCQEKFEKKSRSTN

SEQ ID NO: 73 - protein, 45 aa, Artificial Sequence
  Synthetic
  MISC_FEATURE (1)..(1): X is N or D
  MISC_FEATURE (2)..(2): X is T or D
  MISC_FEATURE (3)..(3): X is T or K
  MISC_FEATURE (4)..(4): X is A or S
  MISC_FEATURE (5)..(5): X is K, D or E
  MISC_FEATURE (6)..(6): X is R, K, D or E
  MISC_FEATURE (8)..(8): X is K, Q or E
  MISC_FEATURE (9)..(9): X is K, D or E
  MISC_FEATURE (10)..(10): X is K, L, N or E
  MISC_FEATURE (12)..(12): X is K, L, R or E
  MISC_FEATURE (13)..(13): X is K, D, R or E
  MISC_FEATURE (15)..(15): X is K, L or E
  MISC_FEATURE (16)..(16): X is K, R, Q or E
  MISC_FEATURE (17)..(17): X is K, R, I or E
  MISC_FEATURE (19)..(19): X is K, Q or E
  MISC_FEATURE (20)..(20): X is K, R or E
  MISC_FEATURE (21)..(21): X is Q, K, R or E
  MISC_FEATURE (22)..(22): X is N or G
  MISC_FEATURE (23)..(23): X is D or S
  MISC_FEATURE (24)..(24): X is E, K, D or S
  MISC_FEATURE (25)..(25): X is T, K, D or Q
  MISC_FEATURE (27)..(27): X is I, L or Q
  MISC_FEATURE (28)..(28): X is R, K or E
  MISC_FEATURE (29)..(29): X is C or A
  MISC_FEATURE (31)..(31): X is E or K
  MISC_FEATURE (32)..(32): X is L or K
  MISC_FEATURE (34)..(34): X is R, Q, E or K
  MISC_FEATURE (35)..(35): X is Q, E or K
  MISC_FEATURE (38)..(38): X is R, E or K
  MISC_FEATURE (39)..(39): X is R, E, L or I
  MISC_FEATURE (41)..(42): X is R, E, or K
  MISC_FEATURE (43)..(43): X is N, Q, R or D
  MISC_FEATURE (44)..(44): X is N, or G
  MISC_FEATURE (45)..(45): X is N, or D
XXXXXXAXXXLXXAXXXAXXXXXXXAXXXVXXLXXALXXAXXXXX

SEQ ID NO: 74 - protein, 44 aa, Artificial Sequence
  Synthetic
  MISC_FEATURE (1)..(1): X is D, E or K
  MISC_FEATURE (2)..(2): X is T, E or K
  MISC_FEATURE (8)..(8): X is Y, E, K, or R
  MISC_FEATURE (9)..(9): X is L, K, or R
  MISC_FEATURE (12)..(12): X is E, K, or D
  MISC_FEATURE (15)..(15): X is E, R, L or K
  MISC_FEATURE (16)..(16): X is R, I or K
  MISC_FEATURE (19)..(19): X is R, E, N or K
  MISC_FEATURE (20)..(20): X is R, E, or Q
  MISC_FEATURE (23)..(23): X is K, E, or S
  MISC_FEATURE (24)..(24): X is K, T, or D
  MISC_FEATURE (26)..(26): X is I or V
  MISC_FEATURE (27)..(27): X is R, E or K
  MISC_FEATURE (28)..(28): X is C or A
  MISC_FEATURE (30)..(30): X is C, L or A
  MISC_FEATURE (34)..(34): X is E or R
  MISC_FEATURE (37)..(37): X is L, E or K
  MISC_FEATURE (38)..(38): X is L, E or R
  MISC_FEATURE (41)..(41): X is K or R
  MISC_FEATURE (42)..(42): X is N,Q, E or R
  MISC_FEATURE (43)..(43): X is N or G
  MISC_FEATURE (44)..(44): X is N or D
XXAIEAVXXLAXALXXALXXNDXXAXXXVXLLAXALXXALXXXX

SEQ ID NO: 75 - protein, 44 aa, Artificial Sequence
  Synthetic
  MISC_FEATURE (1)..(1): X is D or E
  MISC_FEATURE (2)..(2): X is K, S, D or E
  MISC_FEATURE (5)..(5): X is R or E
  MISC_FEATURE (6)..(6): X is T, N, K or E
  MISC_FEATURE (8)..(8): X is R, A, L or E
  MISC_FEATURE (9)..(9): X is R, K or E
  MISC_FEATURE (10)..(10): X is L or W
  MISC_FEATURE (12)..(12): X is K, R, D or E
  MISC_FEATURE (13)..(13): X is K, N, D or E
  MISC_FEATURE (15)..(15): X is K, A, L or E
  MISC_FEATURE (16)..(16): X is K, R, D or E
  MISC_FEATURE (19)..(19): X is K, R, N or E
  MISC_FEATURE (20)..(20): X is Q, R, N or E
  MISC_FEATURE (21)..(21): X is N or G
  MISC_FEATURE (22)..(22): X is N or D
  MISC_FEATURE (23)..(23): X is E or S
  MISC_FEATURE (24)..(24): X is T, D or K
  MISC_FEATURE (25)..(25): X is A, Q, S or K
  MISC_FEATURE (26)..(26): X is I or V
  MISC_FEATURE (27)..(27): X is R, E or K
  MISC_FEATURE (30)..(30): X is C, A, R or L
  MISC_FEATURE (31)..(31): X is E, R or K
  MISC_FEATURE (34)..(34): X is E, R or K
  MISC_FEATURE (35)..(35): X is E, Q, R or K
  MISC_FEATURE (37)..(37): X is E, L, A or K
  MISC_FEATURE (38)..(38): X is E, R or D
  MISC_FEATURE (39)..(39): X is A, R or D
  MISC_FEATURE (41)..(41): X is E, R or K
  MISC_FEATURE (42)..(42): X is N, Q or K
  MISC_FEATURE (43)..(43): X is N or G
  MISC_FEATURE (44)..(44): X is N, K or K
XXAIXXVXXXAXXLXXALXXXXXXXXXEVXXRAXXLXXXLXXXX

SEQ ID NO: 76 - protein, 45 aa, Artificial Sequence
  Synthetic
NDKAKEAEELLRKALEKAEKENDETAIRCVELLKEALERAKKNNN

SEQ ID NO: 77 - protein, 44 aa, Artificial Sequence
  Synthetic
DKAIEAVELLAKALEKALKENDETAIRCVCLLAEALLRALKNNN

SEQ ID NO: 78 - protein, 44 aa, Artificial Sequence
  Synthetic
DKAIEEVERLAKELEKALKENDETKIREVCERAEELLRRLKNNN

SEQ ID NO: 79 - protein, 55 aa, Artificial Sequence
  Synthetic
  MISC_FEATURE (1)..(1): X is S, N or D
  MISC_FEATURE (3)..(3): X is E, T or D
  MISC_FEATURE (4)..(4): X is E, Q or D
  MISC_FEATURE (5)..(5): X is A or N
  MISC_FEATURE (6)..(6): X is R, K, E or L
  MISC_FEATURE (7)..(7): X is R, K, or E
  MISC_FEATURE (8)..(8): X is R, K, N or D
  MISC_FEATURE (10)..(10): X is E, K or D
  MISC_FEATURE (11)..(11): X is E, K or Q
  MISC_FEATURE (13)..(13): X is C, L, R or A
  MISC_FEATURE (14)..(15): X is R, K, E or Q
  MISC_FEATURE (17)..(17): X is K, E or Q
  MISC_FEATURE (18)..(18): X is K, E or R
  MISC_FEATURE (19)..(19): X is I, E or V
  MISC_FEATURE (21)..(21): X is R, E or N
  MISC_FEATURE (22)..(22): X is R, E, T or K
  MISC_FEATURE (24)..(24): X is N or K
  MISC_FEATURE (25)..(25): X is Q, R, E or K
  MISC_FEATURE (26)..(26): X is Q, S, E or N
  MISC_FEATURE (27)..(27): X is G, K or N
  MISC_FEATURE (28)..(28): X is S or N
  MISC_FEATURE (29)..(29): X is Q, K, or R
  MISC_FEATURE (30)..(30): X is E or D
  MISC_FEATURE (31)..(31): X is E, Q, S or D
  MISC_FEATURE (33)..(33): X is R, I, K or L
  MISC_FEATURE (34)..(34): X is R, K or E
  MISC_FEATURE (36)..(36): X is I or V
  MISC_FEATURE (37)..(37): X is E, R, K, or S
  MISC_FEATURE (38)..(38): X is E, R, K, or Q
  MISC_FEATURE (40)..(40): X is L, A or R
  MISC_FEATURE (41)..(41): X is K, E or R
  MISC_FEATURE (42)..(42): X is I or V
  MISC_FEATURE (44)..(44): X is K, E, Q, or R
  MISC_FEATURE (45)..(45): X is R, K, N or Q
  MISC_FEATURE (48)..(48): X is R, K, or E
  MISC_FEATURE (49)..(49): X is L or E
  MISC_FEATURE (51)..(52): X is K, Q, R or E
  MISC_FEATURE (54)..(54): X is N, G or K
  MISC_FEATURE (55)..(55): X is Q, T or S
XSXXXXXXIXXLXXXAXXXAXXAXXXXXXXXAXXAXXXLXXXAXXIAXXAXXAXX

SEQ ID NO: 80 - protein, 54 aa, Artificial Sequence
  Synthetic
  MISC_FEATURE (1)..(1): X is S, A, or P
  MISC_FEATURE (2)..(2): X is E, D, or K
  MISC_FEATURE (3)..(3): X is V or A
  MISC_FEATURE (5)..(5): X is R, L, Q or A
  MISC_FEATURE (6)..(6): X is R, D, K or E
  MISC_FEATURE (9)..(9): X is R, K or E
  MISC_FEATURE (10)..(10): X is C or A
  MISC_FEATURE (12)..(12): X is C, L ,E or A
  MISC_FEATURE (13)..(13): X is R, K ,E or H
  MISC_FEATURE (14)..(14): X is I or V
  MISC_FEATURE (16)..(16): X is K, R or E
  MISC_FEATURE (23)..(23): X is K, Q, R or E
  MISC_FEATURE (24)..(24): X is Q, N or E
  MISC_FEATURE (26)..(26): X is N or G
  MISC_FEATURE (27)..(27): X is S or D
  MISC_FEATURE (28)..(28): X is K or Q
  MISC_FEATURE (29)..(29): X is K, D, T or E
  MISC_FEATURE (30)..(30): X is V or A
  MISC_FEATURE (32)..(32): X is R or E
  MISC_FEATURE (33)..(33): X is R, V, K or E
  MISC_FEATURE (35)..(35): X is V or I
  MISC_FEATURE (36)..(36): X is E, K, D or Q
  MISC_FEATURE (39)..(39): X is L, A, or R
  MISC_FEATURE (40)..(40): X is K, E, T, or R
  MISC_FEATURE (41)..(41): X is I oR V
  MISC_FEATURE (43)..(43): X is K, E, or Q
  MISC_FEATURE (47)..(47): X is K, E, or R
  MISC_FEATURE (50)..(50): X is K, or Q
  MISC_FEATURE (51)..(51): X is K, D, R or Q
  MISC_FEATURE (53)..(53): X is N, G, or K
  MISC_FEATURE (54)..(54): X is Q, T, or S
XXXAXXAIXXLXXXAXLIAELAXXAXXXXXAXXAXXALXXXAXLIAXLAXXAXX

SEQ ID NO: 81 - protein, 54 aa, Artificial Sequence
  Synthetic
  MISC_FEATURE (1)..(1): X is S, P, A or R
  MISC_FEATURE (2)..(2): X is E, D, K, or S
  MISC_FEATURE (3)..(3): X is V or A
  MISC_FEATURE (5)..(5): X is R, K, T or E
  MISC_FEATURE (6)..(6): X is Q, K or E
  MISC_FEATURE (8)..(8): X is K or I
  MISC_FEATURE (9)..(9): X is K, R or E
  MISC_FEATURE (10)..(10): X is C or A
  MISC_FEATURE (12)..(12): X is S, K, Q, or N
  MISC_FEATURE (13)..(13): X is R, E, K, or T
  MISC_FEATURE (14)..(14): X is I or V
  MISC_FEATURE (15)..(15): X is A, K or E
  MISC_FEATURE (16)..(16): X is Q, R, K or E
  MISC_FEATURE (19)..(19): X is Q, R, K or E
  MISC_FEATURE (20)..(20): X is  R, D or E
  MISC_FEATURE (23)..(23): X is  K, R, N or E
  MISC_FEATURE (24)..(24): X is Q or E
  MISC_FEATURE (26)..(26): X is N, G or K
  MISC_FEATURE (27)..(27): X is S or D
  MISC_FEATURE (28)..(28): X is Q, E or D
  MISC_FEATURE (29)..(29): X is K, T, E or D
  MISC_FEATURE (30)..(30): X is V or A
  MISC_FEATURE (31)..(31): X is K, R or A
  MISC_FEATURE (32)..(32): X is K, R, Tor E
  MISC_FEATURE (33)..(33): X is K, I, Qor E
  MISC_FEATURE (35)..(35): X is K, Q or E
  MISC_FEATURE (36)..(36): X is K or E
  MISC_FEATURE (38)..(38): X is L, A, K or N
  MISC_FEATURE (39)..(39): X is D, E, K or Q
  MISC_FEATURE (40)..(40): X is R, E, K or Q
  MISC_FEATURE (41)..(41): X is I or V
  MISC_FEATURE (42)..(42): X is Q, D, R, or E
  MISC_FEATURE (43)..(43): X is Q or K
  MISC_FEATURE (45)..(45): X is Q or I
  MISC_FEATURE (46)..(46): X is E, R, or K
  MISC_FEATURE (47)..(47): X is E, Q, or K
  MISC_FEATURE (49)..(49): X is E, Q, R or K
  MISC_FEATURE (50)..(50): X is R or K
  MISC_FEATURE (51)..(51): X is Q, D, E or N
  MISC_FEATURE (53)..(53): X is G, K or N
  MISC_FEATURE (54)..(54): X is Q, E, T, or S
XXXAXXAXXXLXXXXXLIXXLAXXAXXXXXXXXAXXAXXXXXXLXXXLXXXAXX

SEQ ID NO: 82 - protein, 55 aa, Artificial Sequence
  Synthetic
SSEDAREKIEQLCREAKEIAERAKQQNSQEEAREAIEKLLRIAKRIAELAKQANQ

SEQ ID NO: 83 - protein, 54 aa, Artificial Sequence
  Synthetic
SEVAREAIECLCRIAKLIAELAKQANSQEVAREAIEALLRIAKLIAELAKQANQ

SEQ ID NO: 84 - protein, 54 aa, Artificial Sequence
  Synthetic
SEVAREAIECLSRIAKLIEELAKQANSQEVKREAQEALDRIQKLIEELQKQANQ

SEQ ID NO: 85 - protein, 60 aa, Artificial Sequence
  Synthetic
  MISC_FEATURE (1)..(1): X is D, T, S, or N
  MISC_FEATURE (2)..(2): X is I , A or W
  MISC_FEATURE (3)..(3): X is E or D
  MISC_FEATURE (4)..(4): X is K or D
  MISC_FEATURE (5)..(5): X is L, E or R
  MISC_FEATURE (7)..(7): X is K, E, Q or R
  MISC_FEATURE (8)..(8): X is K, E, T or H
  MISC_FEATURE (10)..(10): X is K, Q, R or E
  MISC_FEATURE (11)..(11): X is K, S, N or E
  MISC_FEATURE (12)..(12): X is L, A or E
  MISC_FEATURE (14)..(14): X is R, D, K, or Q
  MISC_FEATURE (15)..(15): X is R, Q, K, or E
  MISC_FEATURE (17)..(17): X is R, K, or E
  MISC_FEATURE (18)..(18): X is S, D, K, or E
  MISC_FEATURE (19)..(19): X is L, R, K, or E
  MISC_FEATURE (21)..(21): X is Q, D, K, or E
  MISC_FEATURE (22)..(22): X is R, S, K, or E
  MISC_FEATURE (23)..(23): X is L or A
  MISC_FEATURE (24)..(24): X is R, Y, K or E
  MISC_FEATURE (25)..(25): X is K, D, N or Q
  MISC_FEATURE (26)..(26): X is E, D, R or Q
  MISC_FEATURE (27)..(27): X is H, A, R or K
  MISC_FEATURE (29)..(29): X is D, N, or G
  MISC_FEATURE (30)..(30): X is T, N, or S
  MISC_FEATURE (31)..(31): X is Q, D, or E
  MISC_FEATURE (32)..(32): X is A or V
  MISC_FEATURE (34)..(34): X is R, K, N or Q
  MISC_FEATURE (35)..(35): X is D, L, E or T
  MISC_FEATURE (37)..(37): X is Q, E, R or I
  MISC_FEATURE (38)..(38): X is K or E
  MISC_FEATURE (39)..(39): X is L, A, or V
  MISC_FEATURE (40)..(40): X is  A or V
  MISC_FEATURE (41)..(41): X is  S, E, K, or R
  MISC_FEATURE (42)..(42): X is  A, E, L, or Q
  MISC_FEATURE (44)..(44): X is  E, K, Q, or I
  MISC_FEATURE (45)..(45): X is  E, K, Q, or R
  MISC_FEATURE (48)..(48): X is  E, K, or R
  MISC_FEATURE (49)..(49): X is  L, E, K, or Q
  MISC_FEATURE (52)..(52): X is  N, E, K, or R
  MISC_FEATURE (55)..(55): X is  N, K, or Q
  MISC_FEATURE (56)..(56): X is  E, K, Q or R
  MISC_FEATURE (57)..(57): X is  H or Y
  MISC_FEATURE (58)..(58): X is P or K
  MISC_FEATURE (59)..(59): X is N or G
  MISC_FEATURE (60)..(60): X is A or S
XXXXXCXXAXXXAXXAXXXAXXXXXXXPXXXXAXXAXXXXXXAXXAVXXACXLAXXXXXX

SEQ ID NO: 86 - protein, 60 aa, Artificial Sequence
  Synthetic
  MISC_FEATURE (1)..(1): X is D, E, or Q
  MISC_FEATURE (2)..(2): X is I or A
  MISC_FEATURE (4)..(4): X is K, L, Q or R
  MISC_FEATURE (5)..(5): X is K, L, or R
  MISC_FEATURE (7)..(7): X is L or I
  MISC_FEATURE (8)..(8): X is K, T, or E
  MISC_FEATURE (11)..(11): X is S, A, I or Q
  MISC_FEATURE (12)..(12): X is L, A, R or E
  MISC_FEATURE (15)..(15): X is K, I, R or E
  MISC_FEATURE (18)..(18): X is K, A, S or I
  MISC_FEATURE (19)..(19): X is K, A, L or Q
  MISC_FEATURE (21)..(21): X is A or I
  MISC_FEATURE (22)..(22): X is K, D, S or E
  MISC_FEATURE (23)..(24): X is L or A
  MISC_FEATURE (25)..(25): X is L, R, K, or Q
  MISC_FEATURE (26)..(26): X is R, D, Q, or E
  MISC_FEATURE (27)..(27): X is H, R, A, or L
  MISC_FEATURE (29)..(29): X is D or N
  MISC_FEATURE (30)..(30): X is S, T or N
  MISC_FEATURE (31)..(31): X is Q, E, D, or K
  MISC_FEATURE (32)..(32): X is A or V
  MISC_FEATURE (34)..(34): X is K, R, A or E
  MISC_FEATURE (35)..(35): X is D, L, K, or E
  MISC_FEATURE (37)..(37): X is I or L
  MISC_FEATURE (38)..(38): X is K, E, R, or Q
  MISC_FEATURE (39)..(39): X is L, A, or V
  MISC_FEATURE (40)..(40): X is A or V
  MISC_FEATURE (41)..(41): X is S, I, A or R
  MISC_FEATURE (42)..(42): X is Q, A, L, or E
  MISC_FEATURE (45)..(45): X is Q, K, R, or E
  MISC_FEATURE (48)..(48): X is Q, K, Y, or L
  MISC_FEATURE (49)..(49): X is Q, K, E, or L
  MISC_FEATURE (52)..(52): X is Q, K, E, or R
  MISC_FEATURE (55)..(55): X is Q or E
  MISC_FEATURE (56)..(56): X is K, R, Q or E
  MISC_FEATURE (57)..(57): X is H or Y
  MISC_FEATURE (59)..(59): X is N or G
  MISC_FEATURE (60)..(60): X is A or S
XXAXXCXXAAXXAAXAAXXAXXXXXXXPXXXXAXXAXXXXXXAAXAVXXACXLAXXXPXX

SEQ ID NO: 87 - protein, 60 aa, Artificial Sequence
  Synthetic
  MISC_FEATURE (1)..(1): X is D, E, K, or Q
  MISC_FEATURE (2)..(2): X is I, A, E, or Q
  MISC_FEATURE (4)..(4): X is I, R, or K
  MISC_FEATURE (5)..(5): X is E, D, R, or K
  MISC_FEATURE (7)..(7): X is I or L
  MISC_FEATURE (8)..(8): X is K, E, or R
  MISC_FEATURE (9)..(9): X is D, A, K or E
  MISC_FEATURE (11)..(11): X is I, A, S or E
  MISC_FEATURE (12)..(12): X is K, R or E
  MISC_FEATURE (15)..(15): X is K, R or E
  MISC_FEATURE (16)..(16): X is A, N, Q or E
  MISC_FEATURE (18)..(18): X is A, I, S or E
  MISC_FEATURE (19)..(19): X is K, R or E
  MISC_FEATURE (21)..(21): X is A or I
  MISC_FEATURE (22)..(22): X is Q, D, R, or E
  MISC_FEATURE (23)..(23): X is I, L, K or E
  MISC_FEATURE (24)..(24): X is  L or A
  MISC_FEATURE (25)..(25): X is Q, K, R or S
  MISC_FEATURE (26)..(26): X is D, K, R or E
  MISC_FEATURE (27)..(27): X is Y, R or H
  MISC_FEATURE (29)..(29): X is D, N or G
  MISC_FEATURE (30)..(30): X is D, S or T
  MISC_FEATURE (31)..(31): X is Q, D, S, or E
  MISC_FEATURE (32)..(32): X is K, D, R, or E
  MISC_FEATURE (34)..(34): X is K, Q, R, or E
  MISC_FEATURE (35)..(35): X is K, D, R, or E
  MISC_FEATURE (36)..(36): X is K, D, A, or E
  MISC_FEATURE (37)..(37): X is I or L
  MISC_FEATURE (38)..(38): X is K, D, R, or E
  MISC_FEATURE (39)..(39): X is K, Q, R, or E
  MISC_FEATURE (40)..(40): X is A or V
  MISC_FEATURE (41)..(41): X is S, R, A or I
  MISC_FEATURE (42)..(42): X is Q, K, R, or E
  MISC_FEATURE (43)..(43): X is D, L, T or K
  MISC_FEATURE (45)..(46): X is R, D, K, or E
  MISC_FEATURE (48)..(48): X is L, A, I or K
  MISC_FEATURE (49)..(49): X is R, K, Q or E
  MISC_FEATURE (50)..(50): X is R, K, D or E
  MISC_FEATURE (52)..(52): X is R, K or E
  MISC_FEATURE (53)..(53): X is R or K
  MISC_FEATURE (55)..(55): X is Q, E, or D
  MISC_FEATURE (56)..(56): X is Q, E, or K
  MISC_FEATURE (57)..(57): X is H, N or Y
  MISC_FEATURE (59)..(59): X is N or G
  MISC_FEATURE (60)..(60): X is A, Q or S
XXAXXCXXXAXXAAXXAXXAXXXXXXXPXXXXAXXXXXXXXXXAXXVXXXCXXAXXXPXX

SEQ ID NO: 88 - protein, 60 aa, Artificial Sequence
  Synthetic
DIEKLCKKAESEAREARSKAEELRQRHPDSQAARDAQKLASQAEEAVKLACELAQEHPNA

SEQ ID NO: 89 - protein, 60 aa, Artificial Sequence
  Synthetic
DIAKLCIKAASEAAEAASKAAELAQRHPDSQAARDAIKLASQAAEAVKLACELAQEHPNA

SEQ ID NO: 90 - protein, 60 aa, Artificial Sequence
  Synthetic
DIAKKCIKAASEAAEEASKAAEEAQRHPDSQKARDEIKEASQKAEEVKERCERAQEHPNA

SEQ ID NO: 91 - protein, 38 aa, Artificial Sequence
  Synthetic
  MISC_FEATURE (1)..(1): X is D, T, or S
  MISC_FEATURE (2)..(2): X is E, D, K, or N
  MISC_FEATURE (3)..(3): X is I, K or Q
  MISC_FEATURE (4)..(4): X is K, E, D or Q
  MISC_FEATURE (5)..(5): X is K, E, H or Q
  MISC_FEATURE (6)..(6): X is V or A
  MISC_FEATURE (7)..(7): X is R, I or K
  MISC_FEATURE (8)..(8): X is E, D, N or K
  MISC_FEATURE (9)..(9): X is E, D or R
  MISC_FEATURE (11)..(11): X is K, Q, N or E
  MISC_FEATURE (12)..(12): X is K, R or E
  MISC_FEATURE (13)..(13): X is L, I or V
  MISC_FEATURE (14)..(14): X is K, S, R or A
  MISC_FEATURE (15)..(15): X is K, R, D or E
  MISC_FEATURE (16)..(16): X is K, Q or T
  MISC_FEATURE (18)..(18): X is D, N or T
  MISC_FEATURE (19)..(19): X is D or T
  MISC_FEATURE (20)..(20): X is D, E, or Q
  MISC_FEATURE (21)..(21): X is D, E, or N
  MISC_FEATURE (22)..(22): X is V or A
  MISC_FEATURE (23)..(23): X is L, Q, K, or R
  MISC_FEATURE (24)..(24): X is D, E, K, or R
  MISC_FEATURE (27)..(27): X is D, E, K, or R
  MISC_FEATURE (28)..(28): X is L, E, K, or A
  MISC_FEATURE (30)..(30): X is K or I
  MISC_FEATURE (31)..(31): X is K, R or E
  MISC_FEATURE (34)..(34): X is K, D or E
  MISC_FEATURE (35)..(35): X is K, D, N or E
XXXXXXXXXAXXXXXXTXXXXXXXVAXXAXXAAXXATS

SEQ ID NO: 92 - protein, 38 aa, Artificial Sequence
  Synthetic
  MISC_FEATURE (1)..(1): X is D, S, E or Q
  MISC_FEATURE (2)..(2): X is D, K, E or N
  MISC_FEATURE (5)..(5): X is K, E, R or T
  MISC_FEATURE (6)..(6): X is V or A
  MISC_FEATURE (8)..(8): X is K, E, R or Q
  MISC_FEATURE (9)..(9): X is E or Q
  MISC_FEATURE (12)..(12): X is K or R
  MISC_FEATURE (13)..(13): X is L, I or V
  MISC_FEATURE (15)..(15): X is K, Q, S, or E
  MISC_FEATURE (16)..(16): X is K, Q, S, or T
  MISC_FEATURE (19)..(19): X is D or T
  MISC_FEATURE (20)..(20): X is K, E, D or T
  MISC_FEATURE (21)..(21): X is E, D or N
  MISC_FEATURE (22)..(22): X is V or A
  MISC_FEATURE (24)..(24): X is E, K, or R
  MISC_FEATURE (27)..(27): X is E, L, Q, or R
  MISC_FEATURE (28)..(28): X is E, L, K, or Q
  MISC_FEATURE (31)..(31): X is E, R, or K
  MISC_FEATURE (34)..(34): X is E, R, or T
  MISC_FEATURE (35)..(35): X is N, D, K or E
  MISC_FEATURE (38)..(38): X is D or S
XXILXXIXXALXXAXXTTXXXXLXVAXXAIXAAXXATX

SEQ ID NO: 93 - protein, 38 aa, Artificial Sequence
  Synthetic
  MISC_FEATURE (1)..(1): X is E, D, S, or K
  MISC_FEATURE (2)..(2): X is E, D, or S
  MISC_FEATURE (5)..(5): X is E, K, or Q
  MISC_FEATURE (6)..(6): X is E, R, K, or L
  MISC_FEATURE (8)..(8): X is E, Q, K, or N
  MISC_FEATURE (9)..(9): X is E, R, K, or N
  MISC_FEATURE (13)..(13): X is E, R, K, or I
  MISC_FEATURE (15)..(15): X is Q, K, or S
  MISC_FEATURE (16)..(16): X is Q, K, E or T
  MISC_FEATURE (19)..(19): X is D or T
  MISC_FEATURE (20)..(20): X is E, K, S or T
  MISC_FEATURE (21)..(21): X is E or D
  MISC_FEATURE (22)..(22): X is E, V or D
  MISC_FEATURE (24)..(24): X is E, R, N or K
  MISC_FEATURE (25)..(25): X is E, R or K
  MISC_FEATURE (27)..(27): X is E, R, L or K
  MISC_FEATURE (28)..(28): X is E or K
  MISC_FEATURE (29)..(29): X is T, D, E or Q
  MISC_FEATURE (31)..(31): X is K, R, E or Q
  MISC_FEATURE (32)..(32): X is K, R, D or Q
  MISC_FEATURE (34)..(34): X is E, R or T
  MISC_FEATURE (35)..(35): X is E, K, N, or Q
  MISC_FEATURE (36)..(36): X is E, K, Q, or S
  MISC_FEATURE (38)..(38): X is D or N
XXILXXIXXALKXAXXTTXXXXLXXAXXXIXXAXXXTX

SEQ ID NO: 94 - protein, 38 aa, Artificial Sequence
  Synthetic
DEIEKVREEAEKLKKKTDDEDVLEVAREAIRAAKEATS

SEQ ID NO: 95 - protein, 38 aa, Artificial Sequence
  Synthetic
DEILKVIKEALKLAKKTTDKDVLEVAREAIRAAEEATD

SEQ ID NO: 96 - protein, 38 aa, Artificial Sequence
  Synthetic
EEILKEIKEALKKAKETTDTEELEKAREQIRKAEESTD

SEQ ID NO: 97 - protein, 38 aa, Artificial Sequence
  Synthetic
  MISC_FEATURE (1)..(1): X is S, T, D, or N
  MISC_FEATURE (2)..(2): X is T, D, or Q
  MISC_FEATURE (3)..(3): X is I, A, V or R
  MISC_FEATURE (4)..(4): X is E, K or D
  MISC_FEATURE (5)..(5): X is E, K or R
  MISC_FEATURE (7)..(7): X is E, I, Q or R
  MISC_FEATURE (8)..(8): X is E, K, Q or R
  MISC_FEATURE (9)..(9): X is E, K, T or L
  MISC_FEATURE (11)..(11): X is E, K, R or Q
  MISC_FEATURE (12)..(12): X is E, D, R or Q
  MISC_FEATURE (13)..(13): X is L, V or I
  MISC_FEATURE (14)..(14): X is R, A, S or K
  MISC_FEATURE (15)..(15): X is R, N, T or K
  MISC_FEATURE (16)..(16): X is K, D, N, or E
  MISC_FEATURE (17)..(17): X is S, A, L, or T
  MISC_FEATURE (18)..(18): X is D or T
  MISC_FEATURE (19)..(19): X is D or N
  MISC_FEATURE (20)..(20): X is D, P, K or E
  MISC_FEATURE (21)..(21): X is T, D, Q or E
  MISC_FEATURE (22)..(22): X is V, A or I
  MISC_FEATURE (23)..(23): X is R, Q or I
  MISC_FEATURE (24)..(24): X is R, E, D or K
  MISC_FEATURE (27)..(27): X is R, E, Q or K
  MISC_FEATURE (28)..(28): X is R, E, L or T
  MISC_FEATURE (31)..(31): X is E or K
  MISC_FEATURE (34)..(34): X is H, Q or K
  MISC_FEATURE (35)..(35): X is R or K
  MISC_FEATURE (36)..(36): X is S, A, N or T
  MISC_FEATURE (37)..(37): X is R or T
  MISC_FEATURE (38)..(38): X is D, S or T
XXXXXIXXXAXXXXXXXXXXXXXXLAXXAAXLAXXXXX

SEQ ID NO: 98 - protein, 38 aa, Artificial Sequence
  Synthetic
  MISC_FEATURE (1)..(1): X is S, K, E or P
  MISC_FEATURE (2)..(2): X is D, T, K or Q
  MISC_FEATURE (3)..(3): X is V or A
  MISC_FEATURE (4)..(4): X is L or W
  MISC_FEATURE (5)..(5): X is K, R or E
  MISC_FEATURE (8)..(8): X is Q, K, R or E
  MISC_FEATURE (9)..(9): X is D, K, R or L
  MISC_FEATURE (12)..(12): X is K, R or E
  MISC_FEATURE (13)..(13): X is L, V or I
  MISC_FEATURE (15)..(15): X is K, E, or Q
  MISC_FEATURE (16)..(16): X is K, R, D, or Q
  MISC_FEATURE (17)..(17): X is S, A or T
  MISC_FEATURE (19)..(19): X is N or D
  MISC_FEATURE (20)..(20): X is N, E, P or D
  MISC_FEATURE (21)..(21): X is E, K or D
  MISC_FEATURE (22)..(22): X is V, A, or I
  MISC_FEATURE (24)..(24): X is R, A, or K
  MISC_FEATURE (28)..(28): X is R, E, L, or K
  MISC_FEATURE (35)..(35): X is R, Q, or K
  MISC_FEATURE (36)..(36): X is S, A, E, or N
  MISC_FEATURE (37)..(37): X is T or R
  MISC_FEATURE (38)..(38): X is D, T or S
XXXXXIVXXALXXAXXXTXXXXIXLALXAAVLAAXXXX

SEQ ID NO: 99 - protein, 38 aa, Artificial Sequence
  Synthetic
  MISC_FEATURE (1)..(1): X is E, K, P or S
  MISC_FEATURE (2)..(2): X is E, K, D or T
  MISC_FEATURE (3)..(3): X is V or A
  MISC_FEATURE (4)..(4): X is L or W
  MISC_FEATURE (5)..(5): X is E, K, or N
  MISC_FEATURE (6)..(6): X is T, I, R or E
  MISC_FEATURE (8)..(8): X is K, A, R or E
  MISC_FEATURE (9)..(9): X is K, R or E
  MISC_FEATURE (12)..(12): X is Q, R or E
  MISC_FEATURE (13)..(13): X is K, D, R or E
  MISC_FEATURE (15)..(15): X is K, Q, R or E
  MISC_FEATURE (16)..(16): X is K, R or E
  MISC_FEATURE (17)..(17): X is S, A, K, or N
  MISC_FEATURE (19)..(19): X is D or N
  MISC_FEATURE (20)..(20): X is D, E, P or N
  MISC_FEATURE (21)..(21): X is D, E, Q or R
  MISC_FEATURE (22)..(22): X is D, E, N or K
  MISC_FEATURE (24)..(24): X is R, E, A or K
  MISC_FEATURE (25)..(25): X is R, E, Q or K
  MISC_FEATURE (26)..(26): X is A, E, D or L
  MISC_FEATURE (28)..(28): X is R, E, or K
  MISC_FEATURE (29)..(29): X is N, Q, R, or K
  MISC_FEATURE (32)..(32): X is D, R, or E
  MISC_FEATURE (33)..(33): X is D, Q, A, or E
  MISC_FEATURE (35)..(35): X is K, Q, or E
  MISC_FEATURE (36)..(36): X is K, R, T or S
  MISC_FEATURE (37)..(37): X is R, T or N
  MISC_FEATURE (38)..(38): X is D, T or N
XXXXXXVXXALXXAXXXTXXXXIXXXLXXAVXXAXXXX

SEQ ID NO: 100 - protein, 38 aa, Artificial Sequence
  Synthetic
SDIEEIRQLAEELRKKSDNEEVRKLAQEAAELAKRSTD

SEQ ID NO: 101 - protein, 38 aa, Artificial Sequence
  Synthetic
SDVLEIVKDALELAKQSTNEEVIKLALKAAVLAAKSTD

SEQ ID NO: 102 - protein, 38 aa, Artificial Sequence
  Synthetic
EEVLEEVKEALRRAKESTDEEEIKEELRKAVEEAESTD

SEQ ID NO: 103 - protein, 38 aa, Artificial Sequence
  Synthetic
  MISC_FEATURE (1)..(1): X is S, D, T, or N
  MISC_FEATURE (2)..(2): X is E, D, K, or L
  MISC_FEATURE (3)..(3): X is Q, A, K, or S
  MISC_FEATURE (4)..(4): X is  K or E
  MISC_FEATURE (5)..(5): X is  K, D, R or E
  MISC_FEATURE (7)..(7): X is R or E
  MISC_FEATURE (8)..(8): X is K, Q, S or E
  MISC_FEATURE (11)..(11): X is K, Q, R or E
  MISC_FEATURE (12)..(12): X is K, D, R or E
  MISC_FEATURE (13)..(13): X is I or V
  MISC_FEATURE (14)..(14): X is R, A, or K
  MISC_FEATURE (15)..(15): X is E, N or K
  MISC_FEATURE (16)..(16): X is Q, N or T
  MISC_FEATURE (18)..(18): X is P or K
  MISC_FEATURE (19)..(19): X is D or N
  MISC_FEATURE (21)..(21): X is D, R, S or E
  MISC_FEATURE (22)..(22): X is L or I
  MISC_FEATURE (24)..(24): X is R, E, or K
  MISC_FEATURE (25)..(25): X is L, Q, E, or K
  MISC_FEATURE (27)..(27): X is N, Q, E, or L
  MISC_FEATURE (28)..(28): X is K, Q, E, or R
  MISC_FEATURE (29)..(29): X is L or V
  MISC_FEATURE (31)..(31): X is D, E, R, or K
  MISC_FEATURE (32)..(32): X is D, E, Q, or K
  MISC_FEATURE (34)..(34): X is R, E, Q, or K
  MISC_FEATURE (35)..(35): X is R, E, T, or K
  MISC_FEATURE (37)..(37): X is R, N, T, or R
  MISC_FEATURE (38)..(38): X is D, N, or S
XXXXXVXXLAXXXXXXLXXTXXAXXAXXXAXXAXXSXX

SEQ ID NO: 104 - protein, 38 aa, Artificial Sequence
  Synthetic
  MISC_FEATURE (1)..(1): X is S, E, Q, or D
  MISC_FEATURE (2)..(2): X is K, N, Q or E
  MISC_FEATURE (4)..(4): X is L or W
  MISC_FEATURE (5)..(5): X is K or E
  MISC_FEATURE (7)..(7): X is V or A
  MISC_FEATURE (8)..(8): X is K, E, Y or A
  MISC_FEATURE (12)..(12): X is R, E, Q or A
  MISC_FEATURE (13)..(13): X is I or V
  MISC_FEATURE (14)..(14): X is A or V
  MISC_FEATURE (15)..(15): X is Q, E, K or L
  MISC_FEATURE (16)..(16): X is Q, R or T
  MISC_FEATURE (19)..(19): X is D or N
  MISC_FEATURE (21)..(21): X is D, E or Q
  MISC_FEATURE (22)..(22): X is L or I
  MISC_FEATURE (24)..(24): X is R, E, or K
  MISC_FEATURE (25)..(25): X is K, L, D, or E
  MISC_FEATURE (28)..(28): X is K, R, D, or E
  MISC_FEATURE (29)..(29): X is L or V
  MISC_FEATURE (31)..(31): X is K, E, Q, or R
  MISC_FEATURE (32)..(32): X is K, E, Q, or N
  MISC_FEATURE (34)..(34): X is V or I
  MISC_FEATURE (35)..(35): X is K, E or R
  MISC_FEATURE (37)..(37): X is T or Q
  MISC_FEATURE (38)..(38): X is D, S, or N
XXAXXVXXLALXXXXXLPXTXXAXXALXXAXXAXXSXX

SEQ ID NO: 105 - protein, 106 aa, Artificial Sequence
  Synthetic
  MISC_FEATURE (1)..(1): X is Q, E, D, or K
  MISC_FEATURE (2)..(2): X is R, E, D, or K
  MISC_FEATURE (4)..(4): X is L or W
  MISC_FEATURE (5)..(5): X is K, D, or E
  MISC_FEATURE (6)..(6): X is K, D, S or I
  MISC_FEATURE (7)..(7): X is V or A
  MISC_FEATURE (8)..(8): X is K, E, Y or A
  MISC_FEATURE (9)..(9): X is K, E, R or Q
  MISC_FEATURE (12)..(12): X is K, E, R or Q
  MISC_FEATURE (13)..(13): X is I, T, R or D
  MISC_FEATURE (14)..(14): X is V or A
  MISC_FEATURE (15)..(15): X is Q, E, K, or L
  MISC_FEATURE (16)..(16): X is Q, R, K, or D
  MISC_FEATURE (17)..(17): X is Y, R, H, or K
  MISC_FEATURE (21)..(21): X is E or D
  MISC_FEATURE (22)..(22): X is E, K or D
  MISC_FEATURE (24)..(25): X is E, K, R or Q
  MISC_FEATURE (26)..(26): X is S or A
  MISC_FEATURE (28)..(28): X is D, E, Q, or R
  MISC_FEATURE (29)..(29): X is K, E, Q, or R
  MISC_FEATURE (31)..(31): X is K, E, Q, or R
  MISC_FEATURE (32)..(32): X is K or E
  MISC_FEATURE (33)..(33): X is K, D, A or E
  MISC_FEATURE (34)..(34): X is V, I or A
  MISC_FEATURE (35)..(35): X is K, E or T
  MISC_FEATURE (36)..(36): X is S or R
  MISC_FEATURE (37)..(37): X is T, N or Q
  MISC_FEATURE (38)..(38): X is T, N, S or D
QEDKEDKRALWKEDSIKDVAYKAEEKQRALQEKRRITDVAQEKLDKQRKYHRPNTEDEDKARKEQEKQRSALEDQRRKEQAKEQREKDEKAVIAKETSRTNQDNST

SEQ ID NO: 106 - protein, 38 aa, Artificial Sequence
  Synthetic
SEKEKVEELAQRIREQLPDTELAREAQELADEARKSDD

SEQ ID NO: 107 - protein, 38 aa, Artificial Sequence
  Synthetic
SEALKVVYLALRIVQQLPDTELAREALELAKEAVKSTD

SEQ ID NO: 108 - protein, 38 aa, Artificial Sequence
  Synthetic
QEALKSVYEALQRVQDKPNTEEARESLERAKEDVKSTD

SEQ ID NO: 109 - protein, 40 aa, Artificial Sequence
  Synthetic
  MISC_FEATURE (1)..(1): X is D or S
  MISC_FEATURE (2)..(2): X is D, T or K
  MISC_FEATURE (4)..(4): X is D or E
  MISC_FEATURE (5)..(5): X is T, K or E
  MISC_FEATURE (7)..(7): X is R or A
  MISC_FEATURE (8)..(8): X is Q, K or E
  MISC_FEATURE (9)..(9): X is R, K or L
  MISC_FEATURE (11)..(11): X is R or A
  MISC_FEATURE (12)..(12): X is D, Q, K or E
  MISC_FEATURE (15)..(15): X is Q, K or R
  MISC_FEATURE (16)..(16): X is Q, K, D or E
  MISC_FEATURE (19)..(19): X is S, A or Q
  MISC_FEATURE (20)..(20): X is S or D
  MISC_FEATURE (21)..(21): X is K, E, P or D
  MISC_FEATURE (22)..(22): X is S, E or D
  MISC_FEATURE (23)..(23): X is S, E or Q
  MISC_FEATURE (25)..(25): X is K or N
  MISC_FEATURE (26)..(26): X is R, Q or K
  MISC_FEATURE (28)..(28): X is D, L or T
  MISC_FEATURE (29)..(29): X is E or K
  MISC_FEATURE (30)..(30): X is E, A, D or L
  MISC_FEATURE (31)..(31): X is I or L
  MISC_FEATURE (32)..(32): X is E, K, R or Q
  MISC_FEATURE (33)..(33): X is K, R or Q
  MISC_FEATURE (34)..(34): X is I or A
  MISC_FEATURE (35)..(35): X is V, R, K or I
  MISC_FEATURE (36)..(36): X is D, R, K or E
  MISC_FEATURE (37)..(37): X is D, R, K or N
  MISC_FEATURE (39)..(39): X is D, K or Q
XXAXXLXXXAXXLLXXNGXXXXXIXXVXXXXXXXXXXAXS

SEQ ID NO: 110 - protein, 40 aa, Artificial Sequence
  Synthetic
  MISC_FEATURE (1)..(1): X is D, S, or W
  MISC_FEATURE (2)..(2): X is D, T, K, or E
  MISC_FEATURE (4)..(4): X is V or A
  MISC_FEATURE (5)..(5): X is K, I, T or A
  MISC_FEATURE (8)..(8): X is V or A
  MISC_FEATURE (9)..(9): X is K or L
  MISC_FEATURE (16)..(16): X is E, Q, K, or R
  MISC_FEATURE (19)..(19): X is S, A or Q
  MISC_FEATURE (22)..(22): X is E, D, S or Q
  MISC_FEATURE (23)..(23): X is E or Q
  MISC_FEATURE (25)..(25): X is V, R, A, or Y
  MISC_FEATURE (26)..(26): X is K or R
  MISC_FEATURE (29)..(29): X is E or H
  MISC_FEATURE (30)..(30): X is E, L, A or W
  MISC_FEATURE (31)..(31): X is L or I
  MISC_FEATURE (32)..(32): X is L or A
  MISC_FEATURE (33)..(33): X is K or R
  MISC_FEATURE (34)..(34): X is I or A
  MISC_FEATURE (35)..(35): X is I or V
  MISC_FEATURE (36)..(36): X is E, Q or K
  MISC_FEATURE (37)..(37): X is  Q or K
  MISC_FEATURE (39)..(39): X is  Q or D
XXAXXLAXXAAALLAXNGXSAXXIXXVLXXXXXXXXXAXS

SEQ ID NO: 111 - protein, 40 aa, Artificial Sequence
  Synthetic
  MISC_FEATURE (1)..(1): X is E, S, or W
  MISC_FEATURE (2)..(2): X is E, D, K or S
  MISC_FEATURE (3)..(3): X is E, Q or T
  MISC_FEATURE (4)..(4): X is V or A
  MISC_FEATURE (5)..(5): X is K, I, T or A
  MISC_FEATURE (6)..(6): X is D, R, K, or E
  MISC_FEATURE (8)..(8): X is V or A
  MISC_FEATURE (9)..(9): X is R, K, L or E
  MISC_FEATURE (10)..(10): X is T, K, D or E
  MISC_FEATURE (13)..(13): X is Q, D or E
  MISC_FEATURE (14)..(14): X is Q, L, R or E
  MISC_FEATURE (16)..(16): X is Q, K, R or E
  MISC_FEATURE (17)..(17): X is D, K, R or E
  MISC_FEATURE (19)..(19): X is S, R or E
  MISC_FEATURE (22)..(22): X is D, S, R or E
  MISC_FEATURE (23)..(23): X is R or E
  MISC_FEATURE (25)..(25): X is R, Y or A
  MISC_FEATURE (26)..(26): X is K or E
  MISC_FEATURE (27)..(27): X is Q, T, S or E
  MISC_FEATURE (29)..(29): X is K, H, R or E
  MISC_FEATURE (30)..(30): X is K, D, N or E
  MISC_FEATURE (31)..(31): X is R, I, L or Q
  MISC_FEATURE (32)..(32): X is L, A or E
  MISC_FEATURE (33)..(33): X is R, K, Q or E
  MISC_FEATURE (34)..(34): X is K or D
  MISC_FEATURE (35)..(35): X is V, ,I, T, or L
  MISC_FEATURE (36)..(36): X is Q, K, R or E
  MISC_FEATURE (37)..(37): X is Q, K, N or E
  MISC_FEATURE (38)..(38): X is S or A
  MISC_FEATURE (39)..(39): X is D, Q, orT
  MISC_FEATURE (40)..(40): X is D or S
XXXXXXAXXXAAXXAXXGXSAXXIXXXLXXXXXXXXXXXX

SEQ ID NO: 112 - protein, 40 aa, Artificial Sequence
  Synthetic
DDAEELRERARDLLRKNGSSEEEIKKVDEELEKIVRKADS

SEQ ID NO: 113 - protein, 40 aa, Artificial Sequence
  Synthetic
DDAVKLAVKAAALLAENGSSAEEIVKVLEELLKIVEKADS

SEQ ID NO: 114 - protein, 40 aa, Artificial Sequence
  Synthetic
EEEVKDAVREAAELAERGSSAEEIRKQLKDRLRKVEESDS

SEQ ID NO: 115 - protein, 40 aa, Artificial Sequence
  Synthetic
  MISC_FEATURE (1)..(1): X is S, T, D, or N
  MISC_FEATURE (2)..(2): X is T, D, or R
  MISC_FEATURE (3)..(3): X is S, A or Q
  MISC_FEATURE (4)..(4): X is E, D or K
  MISC_FEATURE (5)..(5): X is K, Q, R or E
  MISC_FEATURE (8)..(8): X is K, Q, R or D
  MISC_FEATURE (9)..(9): X is K, T, R or E
  MISC_FEATURE (10)..(10): X is V, A, or I
  MISC_FEATURE (11)..(11): X is V, L, or R
  MISC_FEATURE (12)..(12): X is K, N, R or E
  MISC_FEATURE (13)..(13): X is Q, L, D or E
  MISC_FEATURE (14)..(14): X is L, or A
  MISC_FEATURE (15)..(15): X is K or R
  MISC_FEATURE (16)..(16): X is K, N or R
  MISC_FEATURE (17)..(17): X is K, N, S or R
  MISC_FEATURE (19)..(19): X is T, Q, or E
  MISC_FEATURE (20)..(20): X is S or D
  MISC_FEATURE (21)..(21): X is S, P or D
  MISC_FEATURE (22)..(22): X is E, T or D
  MISC_FEATURE (23)..(23): X is E, A, I or D
  MISC_FEATURE (24)..(24): X is E, I or L
  MISC_FEATURE (25)..(25): X is K, N, E, or R
  MISC_FEATURE (26)..(26): X is K or R
  MISC_FEATURE (27)..(27): X is M, A, I or L
  MISC_FEATURE (28)..(28): X is K, R, or E
  MISC_FEATURE (29)..(29): X is Q, K, R, or E
  MISC_FEATURE (30)..(30): X is Q, L, A, or E
  MISC_FEATURE (31)..(31): X is L or I
  MISC_FEATURE (32)..(32): X is K, Q, R or E
  MISC_FEATURE (33)..(33): X is K, D, R or E
  MISC_FEATURE (34)..(34): X is I, V, or L
  MISC_FEATURE (35)..(35): X is I, R, K, or Q
  MISC_FEATURE (36)..(36): X is D, R, K, or E
  MISC_FEATURE (37)..(37): X is S, T, Q, or E
  MISC_FEATURE (39)..(39): X is T or Q
  MISC_FEATURE (40)..(40): X is T or S
XXXXXLAXXXXXXXXXXGXXXXXXXXXXXXXXXXXXXAXX

SEQ ID NO: 116 - protein, 40 aa, Artificial Sequence
  Synthetic
  MISC_FEATURE (1)..(1): X is S, D, or E
  MISC_FEATURE (2)..(2): X is K, T, D, or E
  MISC_FEATURE (4)..(4): X is M or A
  MISC_FEATURE (5)..(5): X is R, K, E or A
  MISC_FEATURE (9)..(9): X is R, K, or E
  MISC_FEATURE (10)..(10): X is V, A or I
  MISC_FEATURE (11)..(11): X is V, L or I
  MISC_FEATURE (13)..(13): X is R, Q or E
  MISC_FEATURE (14)..(14): X is L or A
  MISC_FEATURE (15)..(15): X is V, I or A
  MISC_FEATURE (16)..(16): X is R, K, or E
  MISC_FEATURE (17)..(17): X is R, K, or N
  MISC_FEATURE (19)..(19): X is T, K, Q or E
  MISC_FEATURE (21)..(21): X is S, A, I or Q
  MISC_FEATURE (22)..(22): X is D, T, R or E
  MISC_FEATURE (23)..(23): X is E, A, I or N
  MISC_FEATURE (24)..(24): X is L or I
  MISC_FEATURE (25)..(25): X is D, K, S, or E
  MISC_FEATURE (26)..(26): X is K, R, or T
  MISC_FEATURE (27)..(27): X is M, A, I, or L
  MISC_FEATURE (28)..(28): X is M or A
  MISC_FEATURE (29)..(29): X is R, K or E
  MISC_FEATURE (30)..(30): X is L, A, Q or M
  MISC_FEATURE (31)..(31): X is L or I
  MISC_FEATURE (32)..(32): X is Q, R or I
  MISC_FEATURE (33)..(33): X is Q, R, K or E
  MISC_FEATURE (34)..(34): X is I, V or L
  MISC_FEATURE (36)..(36): X is Q, K, or E
  MISC_FEATURE (37)..(37): X is S, Q, A or E
  MISC_FEATURE (39)..(39): X is K, Q or T
  MISC_FEATURE (40)..(40): X is S or T
XXAXXLALXXXLXXXXXGXSXXXXXXXXXXXXXXIXXAXX

SEQ ID NO: 117 - protein, 40 aa, Artificial Sequence
  Synthetic
  MISC_FEATURE (1)..(1): X is D, S, or E
  MISC_FEATURE (2)..(2): X is D, T, or E
  MISC_FEATURE (3)..(3): X is Q, A, L, or E
  MISC_FEATURE (4)..(4): X is  A or M
  MISC_FEATURE (5)..(5): X is K, R, A or E
  MISC_FEATURE (6)..(6): X is K, R, Q or E
  MISC_FEATURE (9)..(9): X is K, R, or E
  MISC_FEATURE (10)..(10): X is T, Q, D or E
  MISC_FEATURE (11)..(11): X is V, L or I
  MISC_FEATURE (13)..(13): X is D, R, K or E
  MISC_FEATURE (14)..(14): X is D, R, A or E
  MISC_FEATURE (15)..(15): X is V, A or I
  MISC_FEATURE (16)..(16): X is R, K, Q, or E
  MISC_FEATURE (17)..(17): X is D, K, T, or E
  MISC_FEATURE (19)..(19): X is Q, K, T, or R
  MISC_FEATURE (20)..(20): X is S or D
  MISC_FEATURE (21)..(21): X is S, A, I or Q
  MISC_FEATURE (22)..(22): X is D, E, R, or Q
  MISC_FEATURE (23)..(23): X is D, E, S, or Q
  MISC_FEATURE (24)..(24): X is L or I
  MISC_FEATURE (25)..(25): X is K, D, R,  or E
  MISC_FEATURE (26)..(26): X is K, Q, R,  or E
  MISC_FEATURE (27)..(27): X is S, T, L or E
  MISC_FEATURE (28)..(28): X is M or A
  MISC_FEATURE (29)..(29): X is R, Q, or E
  MISC_FEATURE (30)..(30): X is K, Q, or E
  MISC_FEATURE (31)..(31): X is L or I
  MISC_FEATURE (32)..(32): X is K, Q or I
  MISC_FEATURE (33)..(33): X is K, R or E
  MISC_FEATURE (34)..(34): X is K or E
  MISC_FEATURE (36)..(36): X is K, Q or R
  MISC_FEATURE (37)..(37): X is K, Q, N or D
  MISC_FEATURE (38)..(38): X is R or S
  MISC_FEATURE (39)..(39): X is T or Q
  MISC_FEATURE (40)..(40): X is T, S or D
XXXXXXALXXXLXXXXXGXXXXXXXXXXXXXXXXIXXXXX

SEQ ID NO: 118 - protein, 40 aa, Artificial Sequence
  Synthetic
SDSEKLAKRVLKELKRRGTSDEELERMKRELEKIIKSATS

SEQ ID NO: 119 - protein, 40 aa, Artificial Sequence
  Synthetic
SDAMRLALRVVLELVRRGTSSEILEKMMRMLIKIIQSATS

SEQ ID NO: 120 - protein, 40 aa, Artificial Sequence
  Synthetic
DDQMREALRQVLEEVRKGTSSEQLERSMRKLIKEIKKRTS

SEQ ID NO: 121 - protein, 46 aa, Artificial Sequence
  Synthetic
  MISC_FEATURE (2)..(2): X is D, Q, R orE
  MISC_FEATURE (4)..(4): X is K, Q, or E
  MISC_FEATURE (5)..(5): X is K, Q, R or E
  MISC_FEATURE (6)..(6): X is L or E
  MISC_FEATURE (8)..(8): X is R or E
  MISC_FEATURE (9)..(9): X is R, K or E
  MISC_FEATURE (11)..(11): X is A, K or E
  MISC_FEATURE (12)..(12): X is K or E
  MISC_FEATURE (13)..(13): X is K, R, A or E
  MISC_FEATURE (15)..(15): X is K, R, Q or E
  MISC_FEATURE (16)..(16): X is K, S, Q or E
  MISC_FEATURE (17)..(17): X is L, A or V
  MISC_FEATURE (20)..(20): X is R, D, K or E
  MISC_FEATURE (21)..(21): X is S, T, K or Q
  MISC_FEATURE (22)..(22): X is T, N or R
  MISC_FEATURE (23)..(23): X is N or D
  MISC_FEATURE (24)..(24): X is E or D
  MISC_FEATURE (25)..(25): X is E, K, R or D
  MISC_FEATURE (26)..(26): X is L or T
  MISC_FEATURE (28)..(28): X is K or E
  MISC_FEATURE (29)..(29): X is K, D, L or E
  MISC_FEATURE (31)..(31): X is K, Q or E
  MISC_FEATURE (32)..(32): X is K, R or E
  MISC_FEATURE (35)..(35): X is K, R, Q or E
  MISC_FEATURE (36)..(36): X is K, L, Q or E
  MISC_FEATURE (38)..(38): X is K, N or E
  MISC_FEATURE (39)..(39): X is K, Q, R or E
  MISC_FEATURE (42)..(42): X is K, D, R or E
  MISC_FEATURE (43)..(43): X is K, N, R or E
  MISC_FEATURE (44)..(44): X is Y or L
SXAXXXAXXAXXXAXXXCKXXXXXXXCXXLXXLAXXLXXLAXXXPD

SEQ ID NO: 122 - protein, 46 aa, Artificial Sequence
  Synthetic
  MISC_FEATURE (2)..(2): X is R, T, D or E
  MISC_FEATURE (5)..(5): X is R, K, Q or E
  MISC_FEATURE (9)..(9): X is R, S, K or E
  MISC_FEATURE (12)..(12): X is L, K or A
  MISC_FEATURE (13)..(13): X is R, E, K or A
  MISC_FEATURE (15)..(15): X is I or L
  MISC_FEATURE (16)..(16): X is I or L
  MISC_FEATURE (17)..(17): X is A, V or L
  MISC_FEATURE (19)..(19): X is R, Q, K or E
  MISC_FEATURE (20)..(20): X is D, Q, K or E
  MISC_FEATURE (21)..(21): X is S, Q or T
  MISC_FEATURE (22)..(22): X is N or T
  MISC_FEATURE (23)..(23): X is N or D
  MISC_FEATURE (24)..(24): X is N, E, S or D
  MISC_FEATURE (25)..(25): X is N, E, K or D
  MISC_FEATURE (28)..(28): X is E, R or Q
  MISC_FEATURE (29)..(29): X is E, K or L
  MISC_FEATURE (31)..(31): X is V or A
  MISC_FEATURE (32)..(32): X is K, E or R
  MISC_FEATURE (35)..(35): X is K, E, Q or S
  MISC_FEATURE (36)..(36): X is K, E, Q or L
  MISC_FEATURE (38)..(38): X is I, A, or V
  MISC_FEATURE (39)..(39): X is K, R, or E
  MISC_FEATURE (42)..(42): X is K, Q, D, or E
  MISC_FEATURE (43)..(43): X is K, R, or E
  MISC_FEATURE (44)..(44): X is Y or L
  MISC_FEATURE (45)..(45): X is P or S
SXAAXLALXAAXXAXXXCXXXXXXXLCXXLXXLAXXLXXLAXXXXD

SEQ ID NO: 123 - protein, 46 aa, Artificial Sequence
  Synthetic
  MISC_FEATURE (2)..(2): X is D or E
  MISC_FEATURE (3)..(3): X is A, N, Q or E
  MISC_FEATURE (5)..(5): X is K, R, Q or E
  MISC_FEATURE (6)..(6): X is K, R, or E
  MISC_FEATURE (9)..(9): X is K, R, or E
  MISC_FEATURE (10)..(10): X is K, R, N or E
  MISC_FEATURE (12)..(12): X is K, A, L or E
  MISC_FEATURE (13)..(13): X is K, N, R or E
  MISC_FEATURE (14)..(14): X is L or A
  MISC_FEATURE (15)..(15): X is L or I
  MISC_FEATURE (16)..(16): X is E, R, or K
  MISC_FEATURE (17)..(17): X is E, R, Q or K
  MISC_FEATURE (19)..(19): X is E, R, Q or K
  MISC_FEATURE (20)..(20): X is E, R, Q or K
  MISC_FEATURE (21)..(21): X is S, D or K
  MISC_FEATURE (22)..(22): X is D or T
  MISC_FEATURE (23)..(23): X is D or N
  MISC_FEATURE (24)..(24): X is D, E, T or S
  MISC_FEATURE (25)..(25): X is D, E, K or Q
  MISC_FEATURE (26)..(26): X is E, K or R
  MISC_FEATURE (28)..(28): X is E, K, Q or R
  MISC_FEATURE (29)..(29): X is E, K or R
  MISC_FEATURE (31)..(31): X is V or A
  MISC_FEATURE (32)..(32): X is K, R, or E
  MISC_FEATURE (33)..(33): X is K, R, Q or E
  MISC_FEATURE (35)..(35): X is K, Q or E
  MISC_FEATURE (36)..(36): X is K, R or E
  MISC_FEATURE (37)..(37): X is L, E, D, or K
  MISC_FEATURE (38)..(38): X is I, V or A
  MISC_FEATURE (39)..(39): X is R, E, or K
  MISC_FEATURE (40)..(40): X is R, E, or K
  MISC_FEATURE (42)..(42): X is Q, R, E, or K
  MISC_FEATURE (43)..(43): X is D, E, or K
  MISC_FEATURE (44)..(44): X is D, N, or H
  MISC_FEATURE (46)..(46): X is D or K
SXXAXXALXXAXXXXXXCXXXXXXXXCXXLXXXAXXXXXXAXXXPX

SEQ ID NO: 124 - protein, 46 aa, Artificial Sequence
  Synthetic
SEAEELARRAAKEAKELCKRSTDEELCKELKKLAELLKELAERYPD

SEQ ID NO: 125 - protein, 46 aa, Artificial Sequence
  Synthetic
SEAAKLALKAALEAIELCKQSTDEELCEELVKLAQKLIELAKRYPD

SEQ ID NO: 126 - protein, 46 aa, Artificial Sequence
  Synthetic
SEEAKRALKEAKELIEQCKESTDEDECRELVKRAEELIREAKENPD

SEQ ID NO: 127 - protein, 45 aa, Artificial Sequence
  Synthetic
  MISC_FEATURE (1)..(1): X is D or T
  MISC_FEATURE (2)..(2): X is D, K or E
  MISC_FEATURE (3)..(3): X is R or A
  MISC_FEATURE (4)..(4): X is D, K or E
  MISC_FEATURE (5)..(5): X is K or E
  MISC_FEATURE (6)..(6): X is V or A
  MISC_FEATURE (7)..(7): X is K, R, S or E
  MISC_FEATURE (8)..(8): X is K or E
  MISC_FEATURE (11)..(11): X is D, Q, K or E
  MISC_FEATURE (12)..(12): X is R, Q, K or E
  MISC_FEATURE (13)..(13): X is V or A
  MISC_FEATURE (14)..(14): X is K, R or E
  MISC_FEATURE (15)..(15): X is K or E
  MISC_FEATURE (16)..(16): X is Q, L or E
  MISC_FEATURE (18)..(18): X is Q, K or E
  MISC_FEATURE (19)..(19): X is K or R
  MISC_FEATURE (20)..(20): X is E, S, Q or R
  MISC_FEATURE (22)..(22): X is T, Q, K or E
  MISC_FEATURE (23)..(23): X is S or D
  MISC_FEATURE (24)..(24): X is S, P, E or D
  MISC_FEATURE (25)..(25): X is R, N, E or D
  MISC_FEATURE (28)..(28): X is K, T, E or N
  MISC_FEATURE (29)..(29): X is Q, A, E or D
  MISC_FEATURE (31)..(31): X is Q or R
  MISC_FEATURE (32)..(32): X is K, E or R
  MISC_FEATURE (35)..(35): X is K, D, T or R
  MISC_FEATURE (36)..(36): X is K, L, N or E
  MISC_FEATURE (38)..(38): X is K, D, Q or E
  MISC_FEATURE (39)..(39): X is K, S, Q or E
  MISC_FEATURE (42)..(42): X is K, N, R or D
  MISC_FEATURE (44)..(44): X is S or D
  MISC_FEATURE (45)..(45): X is N or D
XXXXXXXXLIXXXXXXLXXXGXXXXLIXXIXXVLXXAXXAAXSXX

SEQ ID NO: 128 - protein, 45 aa, Artificial Sequence
  Synthetic
  MISC_FEATURE (1)..(1): X is D or E
  MISC_FEATURE (2)..(2): X is D, K or E
  MISC_FEATURE (5)..(5): X is K or E
  MISC_FEATURE (6)..(6): X is V or A
  MISC_FEATURE (8)..(8): X is K, Q, Y or E
  MISC_FEATURE (9)..(9): X is E or L
  MISC_FEATURE (11)..(11): X is V or A
  MISC_FEATURE (12)..(12): X is R, K, E or D
  MISC_FEATURE (13)..(13): X is V or A
  MISC_FEATURE (15)..(15): X is L, K, R or A
  MISC_FEATURE (16)..(16): X is L, R or E
  MISC_FEATURE (18)..(18): X is V, A or T
  MISC_FEATURE (19)..(19): X is R, K or E
  MISC_FEATURE (20)..(20): X is S, Q, R or E
  MISC_FEATURE (22)..(22): X is T, K, Q or E
  MISC_FEATURE (23)..(23): X is S or D
  MISC_FEATURE (24)..(24): X is S or P
  MISC_FEATURE (25)..(25): X is K, R, S or E
  MISC_FEATURE (28)..(28): X is K, R, Q or E
  MISC_FEATURE (29)..(29): X is K, D, Q or E
  MISC_FEATURE (32)..(32): X is K, R or E
  MISC_FEATURE (35)..(35): X is S, A, K or E
  MISC_FEATURE (36)..(36): X is L, K or E
  MISC_FEATURE (39)..(39): X is L, K, R or E
  MISC_FEATURE (42)..(42): X is N, K, R or A
  MISC_FEATURE (43)..(43): X is S or A
  MISC_FEATURE (44)..(44): X is S, T or P
  MISC_FEATURE (45)..(45): X is D or N
XXAIXXAXXIXXXIXXLXXXGXXXXLIXXILXVLXXAAXAAXXXX

SEQ ID NO: 129 - protein, 45 aa, Artificial Sequence
  Synthetic
  MISC_FEATURE (1)..(1): X is D, R, or E
  MISC_FEATURE (2)..(2): X is D, S, or E
  MISC_FEATURE (5)..(5): X is K, R, or E
  MISC_FEATURE (6)..(6): X is K, I, Q, or E
  MISC_FEATURE (8)..(8): X is K, R, Y, or E
  MISC_FEATURE (9)..(9): X is K, R, Y, or E
  MISC_FEATURE (9)..(9): X is K, R, or E
  MISC_FEATURE (11)..(11): X is V or A
  MISC_FEATURE (12)..(12): X is R, K, D or E
  MISC_FEATURE (13)..(13): X is R or T
  MISC_FEATURE (15)..(15): X is L, A, R or K
  MISC_FEATURE (16)..(16): X is R or E
  MISC_FEATURE (18)..(18): X is T, V, A or S
  MISC_FEATURE (19)..(19): X is R, Q, K, or E
  MISC_FEATURE (20)..(20): X is R, D, K, or E
  MISC_FEATURE (22)..(22): X is T, Q, K, or E
  MISC_FEATURE (23)..(23): X is D, N, T, or S
  MISC_FEATURE (24)..(24): X is E, P or S
  MISC_FEATURE (25)..(25): X is E, D or N
  MISC_FEATURE (26)..(26): X is K, E, D or Q
  MISC_FEATURE (28)..(28): X is K, E, R or S
  MISC_FEATURE (29)..(29): X is E or K
  MISC_FEATURE (30)..(30): X is T, Q, R or E
  MISC_FEATURE (32)..(32): X is K or E
  MISC_FEATURE (33)..(33): X is K, Q or E
  MISC_FEATURE (35)..(35): X is K, R, A or E
  MISC_FEATURE (36)..(36): X is K or E
  MISC_FEATURE (37)..(37): X is K, R, Q or E
  MISC_FEATURE (39)..(39): X is K, R, Q or E
  MISC_FEATURE (40)..(40): X is K or E
  MISC_FEATURE (42)..(42): X is K, A, N or R
  MISC_FEATURE (43)..(43): X is K or S
  MISC_FEATURE (44)..(44): X is P or S
  MISC_FEATURE (45)..(45): X is E or D
XXAIXXAXXIXXXIXXLXXXGXXXXXIXXXLXXLXXXAXXAXXXX

SEQ ID NO: 130 - protein, 45 aa, Artificial Sequence
  Synthetic
DERDKVRELIDRVEKELKREGTSEELIEEIRKVLKKAKEAADSDD

SEQ ID NO: 131 - protein, 45 aa, Artificial Sequence
  Synthetic
DEAIKVAKEIVRVILELVREGTSSELIEEILKVLSLAAEAAKSTD

SEQ ID NO: 132 - protein, 45 aa, Artificial Sequence
  Synthetic
EEAIKKAKEIVRRILELTREGTSEEEIREELKELRKKAQKAKSPE

SEQ ID NO: 133 - protein, 52 aa, Artificial Sequence
  Synthetic
  MISC_FEATURE (1)..(1): X is D, N, or T
  MISC_FEATURE (2)..(2): X is D, K, or E
  MISC_FEATURE (4)..(4): X is D, K, or E
  MISC_FEATURE (5)..(5): X is R, K, or E
  MISC_FEATURE (7)..(7): X is R, N, or Q
  MISC_FEATURE (8)..(8): X is K, E, T, or Q
  MISC_FEATURE (9)..(9): X is K, A, D, or E
  MISC_FEATURE (11)..(11): X is K, Q, D, or E
  MISC_FEATURE (12)..(12): X is K, R, or S
  MISC_FEATURE (14)..(14): X is K, Q, I, or E
  MISC_FEATURE (15)..(15): X is K, D, R, or E
  MISC_FEATURE (16)..(16): X is K, L, A, or E
  MISC_FEATURE (18)..(18): X is K, N, Q, or E
  MISC_FEATURE (19)..(19): X is K, R, D, or E
  MISC_FEATURE (20)..(20): X is L, V or A
  MISC_FEATURE (21)..(21): X is K or A
  MISC_FEATURE (22)..(22): X is K, R, Q or D
  MISC_FEATURE (23)..(23): X is K, N, Q or E
  MISC_FEATURE (24)..(24): X is S or A
  MISC_FEATURE (25)..(25): X is T or N
  MISC_FEATURE (26)..(26): X is D or N
  MISC_FEATURE (27)..(27): X is E or P
  MISC_FEATURE (28)..(28): X is E, N, D or R
  MISC_FEATURE (29)..(29): X is V, A, I or L
  MISC_FEATURE (30)..(30): X is R or I
  MISC_FEATURE (31)..(31): X is K, Q, R or N
  MISC_FEATURE (32)..(32): X is I, L, E or K
  MISC_FEATURE (34)..(34): X is R, Q or K
  MISC_FEATURE (35)..(35): X is E, K, T, or D
  MISC_FEATURE (38)..(38): X is E, K, or D
  MISC_FEATURE (39)..(39): X is Q, E, A, or L
  MISC_FEATURE (41)..(41): X is Q, E, R, or K
  MISC_FEATURE (42)..(42): X is Q, E, R, or K
  MISC_FEATURE (45)..(45): X is D, E, R, or K
  MISC_FEATURE (46)..(46): X is D, E, L, or H
  MISC_FEATURE (49)..(49): X is R, K  or N
  MISC_FEATURE (50)..(50): X is S, N, Q or E
  MISC_FEATURE (51)..(51): X is N or G
  MISC_FEATURE (52)..(52): X is S or D
XXCXXLXXXVXXAXXXLXXXXXXXXXXXXXXXAXXVAXXLXXLAXXACXXXX

SEQ ID NO: 134 - protein, 52 aa, Artificial Sequence
  Synthetic
  MISC_FEATURE (1)..(1): X is D, K, P or E
  MISC_FEATURE (2)..(2): X is D, K, N or E
  MISC_FEATURE (4)..(4): X is L or I
  MISC_FEATURE (5)..(5): X is R, K or E
  MISC_FEATURE (8)..(8): X is S, R, K or E
  MISC_FEATURE (9)..(9): X is R, Q or E
  MISC_FEATURE (11)..(11): X is V or A
  MISC_FEATURE (12)..(12): X is K, R, Q or E
  MISC_FEATURE (14)..(14): X is V or A
  MISC_FEATURE (15)..(15): X is Q, K, R or E
  MISC_FEATURE (16)..(16): X is L, K, A or E
  MISC_FEATURE (18)..(18): X is V or A
  MISC_FEATURE (19)..(19): X is K, D, Q, or E
  MISC_FEATURE (20)..(20): X is L, V, or A
  MISC_FEATURE (22)..(22): X is K, R, A or E
  MISC_FEATURE (23)..(23): X is K, N, Q or E
  MISC_FEATURE (24)..(24): X is A or S
  MISC_FEATURE (27)..(27): X is E or P
  MISC_FEATURE (28)..(28): X is K, N, Q or E
  MISC_FEATURE (29)..(29): X is V, A, I or L
  MISC_FEATURE (31)..(31): X is R, K or E
  MISC_FEATURE (32)..(32): X is V, L, I or K
  MISC_FEATURE (34)..(34): X is L or A
  MISC_FEATURE (35)..(35): X is R, D, K or E
  MISC_FEATURE (38)..(38): X is R, A, L or E
  MISC_FEATURE (39)..(39): X is R, A, L or E
  MISC_FEATURE (42)..(42): X is R, N, K or E
  MISC_FEATURE (45)..(45): X is Y, A, L or Q
  MISC_FEATURE (46)..(46): X is E, L, K or I
  MISC_FEATURE (49)..(49): X is E, K or R
  MISC_FEATURE (50)..(50): X is S, Q, E or N
  MISC_FEATURE (51)..(51): X is G, R or N
  MISC_FEATURE (52)..(52): X is D or N
XXCXXLAXXVXXAXXXLXXXAXXXTDXXXIXXAXXVAXXLIXLAXXACXXXX

SEQ ID NO: 135 - protein, 52 aa, Artificial Sequence
  Synthetic
  MISC_FEATURE (1)..(1): X is D, K, P or E
  MISC_FEATURE (2)..(2): X is S, D, N or E
  MISC_FEATURE (4)..(4): X is L or I
  MISC_FEATURE (5)..(5): X is R, K, N or E
  MISC_FEATURE (6)..(6): X is T or E
  MISC_FEATURE (8)..(8): X is S, A, Y or E
  MISC_FEATURE (9)..(9): X is K, Q or E
  MISC_FEATURE (11)..(11): X is V or A
  MISC_FEATURE (12)..(12): X is K, Q, R or E
  MISC_FEATURE (13)..(13): X is K, S, R or E
  MISC_FEATURE (14)..(14): X is V or A
  MISC_FEATURE (15)..(15): X is K, Q, R or E
  MISC_FEATURE (16)..(16): X is K or E
  MISC_FEATURE (18)..(18): X is V or A
  MISC_FEATURE (19)..(19): X is K, Q, or E
  MISC_FEATURE (20)..(20): X is K, Q, R or E
  MISC_FEATURE (22)..(22): X is K, L, R or E
  MISC_FEATURE (23)..(23): X is K or R
  MISC_FEATURE (24)..(24): X is S, A  or D
  MISC_FEATURE (26)..(26): X is N or D
  MISC_FEATURE (27)..(27): X is E or P
  MISC_FEATURE (28)..(28): X is E, N, D or Q
  MISC_FEATURE (29)..(29): X is E, K, R or S
  MISC_FEATURE (31)..(31): X is K or R
  MISC_FEATURE (32)..(32): X is K, E or R
  MISC_FEATURE (33)..(33): X is L, A, or D
  MISC_FEATURE (34)..(34): X is L or A
  MISC_FEATURE (35)..(35): X is K, Q, R or E
  MISC_FEATURE (36)..(36): X is K, Q, R or E
  MISC_FEATURE (38)..(38): X is Q, L, A or E
  MISC_FEATURE (39)..(39): X is K, R, D or E
  MISC_FEATURE (40)..(40): X is Q, R, T or E
  MISC_FEATURE (42)..(42): X is K, R, N or E
  MISC_FEATURE (43)..(43): X is K or E
  MISC_FEATURE (45)..(45): X is Q, A, Y or E
  MISC_FEATURE (46)..(46): X is K or E
  MISC_FEATURE (47)..(47): X is K, R, Q, or N
  MISC_FEATURE (49)..(49): X is K, R, Q, or E
  MISC_FEATURE (50)..(50): X is K, R, N, or E
  MISC_FEATURE (52)..(52): X is D or Q
XXCXXXAXXVXXXXXXLXXXAXXXTXXXXIXXXXXXAXXXIXXAXXXCXXGX

SEQ ID NO: 136 - protein, 52 aa, Artificial Sequence
  Synthetic
DECERLRQEVEKAEKELEKLAKQSTDEEVRQIAREVAKQLRRLAEEACRSNS

SEQ ID NO: 137 - protein, 52 aa, Artificial Sequence
  Synthetic
DECLRLASEVVKAVQELVKLAEQATDEEVIRVALEVARELIRLAQEACRSND

SEQ ID NO: 138 - protein, 52 aa, Artificial Sequence
  Synthetic
EECLREASEVVKEVQELVKEAEKSTDEEEIRELLQRAEERIREAQERCREGD

SEQ ID NO: 139 - protein, 54 aa, Artificial Sequence
  Synthetic
  MISC_FEATURE (1)..(1): X is T, S, or D
  MISC_FEATURE (2)..(2): X is R, D, K or E
  MISC_FEATURE (3)..(3): X is Q, A, T, or V
  MISC_FEATURE (4)..(4): X is K, E, or D
  MISC_FEATURE (5)..(5): X is K, E, or R
  MISC_FEATURE (6)..(6): X is Q, K, E, or R
  MISC_FEATURE (7)..(7): X is L, A or I
  MISC_FEATURE (8)..(8): X is D, K or R
  MISC_FEATURE (9)..(9): X is E, Q, or T
  MISC_FEATURE (10)..(10): X is V or A
  MISC_FEATURE (11)..(11): X is L, I, V or E
  MISC_FEATURE (12)..(12): X is K or E
  MISC_FEATURE (13)..(13): X is R or E
  MISC_FEATURE (15)..(15): X is Q, R or K
  MISC_FEATURE (16)..(16): X is E, R or K
  MISC_FEATURE (17)..(17): X is L or A
  MISC_FEATURE (19)..(19): X is K, D, or E
  MISC_FEATURE (22)..(22): X is R or A
  MISC_FEATURE (23)..(23): X is R, Q or K
  MISC_FEATURE (24)..(24): X is R, L or K
  MISC_FEATURE (25)..(25): X is M, A, or E
  MISC_FEATURE (26)..(26): X is S, T, or D
  MISC_FEATURE (27)..(27): X is N, S, T, or D
  MISC_FEATURE (28)..(28): X is D, P, S or E
  MISC_FEATURE (29)..(29): X is D, N, K or E
  MISC_FEATURE (30)..(30): X is R, Q, K or E
  MISC_FEATURE (32)..(32): X is N, Q, or K
  MISC_FEATURE (33)..(33): X is E, R, or K
  MISC_FEATURE (35)..(35): X is Q, I, or K
  MISC_FEATURE (36)..(37): X is Q, D, E or K
  MISC_FEATURE (39)..(39): X is E or K
  MISC_FEATURE (40)..(40): X is R, Q, E or K
  MISC_FEATURE (42)..(42): X is Q, I or K
  MISC_FEATURE (43)..(43): X is Q, E, R or K
  MISC_FEATURE (44)..(44): X is M, A, D, or L
  MISC_FEATURE (45)..(45): X is I, T or L
  MISC_FEATURE (46)..(46): X is R, K, E, or D
  MISC_FEATURE (47)..(47): X is R, Q, E, or D
  MISC_FEATURE (49)..(49): X is V, S, A or H
  MISC_FEATURE (50)..(50): X is K, R, or E
  MISC_FEATURE (51)..(51): X is K, Q, or E
  MISC_FEATURE (52)..(52): X is V or I
  MISC_FEATURE (53)..(53): X is T, D, or E
  MISC_FEATURE (54)..(54): X is D or N
XXXXXXXXXXXXXIXXXAXEAXXXXXXXXXAXXIXXXAXXAXXXXXXAXXXXXX

SEQ ID NO: 140 - protein, 54 aa, Artificial Sequence
  Synthetic
  MISC_FEATURE (1)..(1): X is N, V, A or D
  MISC_FEATURE (2)..(2): X is N, Q, E or D
  MISC_FEATURE (3)..(3): X is V, A, or L
  MISC_FEATURE (4)..(4): X is V, I, or L
  MISC_FEATURE (5)..(6): X is R, K, Q or E
  MISC_FEATURE (7)..(8): X is L, I or A
  MISC_FEATURE (9)..(9): X is K, H, R or E
  MISC_FEATURE (10)..(10): X is V or A
  MISC_FEATURE (11)..(11): X is V, I or A
  MISC_FEATURE (12)..(12): X is K, R, Q or E
  MISC_FEATURE (13)..(13): X is R, L or E
  MISC_FEATURE (16)..(16): X is R or E
  MISC_FEATURE (17)..(17): X is L or A
  MISC_FEATURE (19)..(19): X is Q, K ,or E
  MISC_FEATURE (20)..(20): X is R, K ,or E
  MISC_FEATURE (22)..(22): X is M or A
  MISC_FEATURE (23)..(23): X is K, R, or E
  MISC_FEATURE (24)..(24): X is K, R, or L
  MISC_FEATURE (25)..(25): X is M or A
  MISC_FEATURE (26)..(26): X is T, E, or S
  MISC_FEATURE (27)..(27): X is T, D, or N
  MISC_FEATURE (28)..(28): X is K, D, P or E
  MISC_FEATURE (29)..(29): X is K, Q or E
  MISC_FEATURE (30)..(30): X is D, Q, R or E
  MISC_FEATURE (33)..(33): X is K, R or E
  MISC_FEATURE (35)..(35): X is A or I
  MISC_FEATURE (36)..(36): X is K, A, R or E
  MISC_FEATURE (37)..(37): X is K, Q or E
  MISC_FEATURE (40)..(40): X is K, Q, R or E
  MISC_FEATURE (43)..(43): X is K or A
  MISC_FEATURE (44)..(44): X is M, D, L or A
  MISC_FEATURE (45)..(45): X is L, I or Q
  MISC_FEATURE (47)..(47): X is R, A or E
  MISC_FEATURE (49)..(49): X is A or V
  MISC_FEATURE (50)..(50): X is K, I, or E
  MISC_FEATURE (51)..(51): X is Q, D or E
  MISC_FEATURE (52)..(52): X is V or I
  MISC_FEATURE (53)..(53): X is T or Q
  MISC_FEATURE (54)..(54): X is D or N
XXXXXXXXXXXXXIIXXAXXAXXXXXXXXXAAXIXXXALXAIXXXAXAXXXXXX

SEQ ID NO: 141 - protein, 54 aa, Artificial Sequence
  Synthetic
  MISC_FEATURE (1)..(1): X is N, D, K or E
  MISC_FEATURE (2)..(2): X is N, D or E
  MISC_FEATURE (3)..(3): X is R, D, Q or K
  MISC_FEATURE (4)..(4): X is L, I  or V
  MISC_FEATURE (5)..(5): X is K, R, or E
  MISC_FEATURE (6)..(6): X is K, R, Q or E
  MISC_FEATURE (7)..(7): X is L, I, A or T
  MISC_FEATURE (8)..(8): X is L, I or A
  MISC_FEATURE (9)..(9): X is R, E, D, or K
  MISC_FEATURE (10)..(10): X is R, E, Q, or K
  MISC_FEATURE (11)..(11): X is V, I or A
  MISC_FEATURE (12)..(12): X is K, L, N or E
  MISC_FEATURE (13)..(13): X is K, R or E
  MISC_FEATURE (14)..(14): X is I or E
  MISC_FEATURE (16)..(16): X is K, R or E
  MISC_FEATURE (17)..(17): X is K, R, N or E
  MISC_FEATURE (19)..(19): X is K, Q, R or E
  MISC_FEATURE (20)..(20): X is K, Q, R or E
  MISC_FEATURE (21)..(21): X is K, D, R or E
  MISC_FEATURE (22)..(22): X is S or A
  MISC_FEATURE (23)..(23): X is K, R, D, or E
  MISC_FEATURE (24)..(24): X is K, R, or E
  MISC_FEATURE (25)..(25): X is A or E
  MISC_FEATURE (26)..(26): X is T, D, or S
  MISC_FEATURE (27)..(27): X is T, D, N or S
  MISC_FEATURE (28)..(28): X is K, P, R, or D
  MISC_FEATURE (29)..(29): X is Q, N, or E
  MISC_FEATURE (30)..(30): X is K, D, R or E
  MISC_FEATURE (33)..(33): X is K, N, R or E
  MISC_FEATURE (34)..(34): X is I, R or E
  MISC_FEATURE (35)..(35): X is I or A
  MISC_FEATURE (36)..(36): X is K, L, R or A
  MISC_FEATURE (37)..(37): X is K, Q, R or E
  MISC_FEATURE (40)..(40): X is K, Q, R or E
  MISC_FEATURE (41)..(41): X is K, Q, R or D
  MISC_FEATURE (43)..(43): X is A, R or K
  MISC_FEATURE (44)..(44): X is K, Q, N, or E
  MISC_FEATURE (45)..(45): X is R, T, H, or E
  MISC_FEATURE (47)..(47): X is R, K, N, or E
  MISC_FEATURE (48)..(48): X is R, K, D, or E
  MISC_FEATURE (49)..(49): X is V, A or E
  MISC_FEATURE (50)..(50): X is R, Q, K or E
  MISC_FEATURE (51)..(51): X is R, K or E
  MISC_FEATURE (52)..(52): X is D, R, K or E
  MISC_FEATURE (53)..(53): X is D, T, K or Q
  MISC_FEATURE (54)..(54): X is D, N, G or S
XXXXXXXXXXXXXXIXXAXXXXXXXXXXXXAAXXXXXALXXIXXXAXXXXXXXX

SEQ ID NO: 142 - protein, 54 aa, Artificial Sequence
  Synthetic
TRQKEQLDEVLEEIQRLAEEARKLMTDEEEAKKIQEEAERAKEMLRRAVEKVTD

SEQ ID NO: 143 - protein, 54 aa, Artificial Sequence
  Synthetic
NEVIEKLLEVVKEIIRLAEEAMKKMTDEEEAAKIAKEALEAIKMLARAVEEVTD

SEQ ID NO: 144 - protein, 54 aa, Artificial Sequence
  Synthetic
KERIEQLLREVKEEIRRAEEESRKETDDEEAAKRAREALRRIRERAREVEEDKS

SEQ ID NO: 145 - protein, 55 aa, Artificial Sequence
  Synthetic
  MISC_FEATURE (1)..(1): X is D, T, or N
  MISC_FEATURE (2)..(2): X is D or E
  MISC_FEATURE (3)..(3): X is D, N, Q or E
  MISC_FEATURE (4)..(4): X is V, I, R or K
  MISC_FEATURE (5)..(5): X is Q, E, R or K
  MISC_FEATURE (6)..(6): X is N, R or K
  MISC_FEATURE (7)..(7): X is I, A or L
  MISC_FEATURE (8)..(8): X is R, K  or E
  MISC_FEATURE (9)..(9): X is N, Q, K  or E
  MISC_FEATURE (10)..(10): X is T, Q, or E
  MISC_FEATURE (11)..(11): X is V or A
  MISC_FEATURE (12)..(12): X is K, R or E
  MISC_FEATURE (13)..(13): X is K, R, Q or E
  MISC_FEATURE (15)..(15): X is K, I, V or A
  MISC_FEATURE (16)..(16): X is K, R, K or E
  MISC_FEATURE (17)..(17): X is K, D, K or E
  MISC_FEATURE (18)..(18): X is A, V, or I
  MISC_FEATURE (19)..(19): X is R, K ,Q or E
  MISC_FEATURE (20)..(20): X is R, K, D or E
  MISC_FEATURE (21)..(21): X is S or A
  MISC_FEATURE (23)..(23): X is D, K, R or E
  MISC_FEATURE (24)..(24): X is N, K, R or E
  MISC_FEATURE (25)..(25): X is N or G
  MISC_FEATURE (26)..(26): X is N or D
  MISC_FEATURE (27)..(27): X is S, T, or P
  MISC_FEATURE (28)..(28): X is E or D
  MISC_FEATURE (29)..(29): X is E or K
  MISC_FEATURE (31)..(31): X is E, L, A or K
  MISC_FEATURE (32)..(32): X is E or K
  MISC_FEATURE (33)..(33): X is L, I or R
  MISC_FEATURE (35)..(35): X is E, K, Q or R
  MISC_FEATURE (36)..(36): X is E, K, Q or N
  MISC_FEATURE (39)..(39): X is E, K, D or R
  MISC_FEATURE (40)..(40): X is T, K, Q or R
  MISC_FEATURE (41)..(41): X is V or I
  MISC_FEATURE (43)..(43): X is R, Q, K, or E
  MISC_FEATURE (44)..(44): X is I, Q, A, or E
  MISC_FEATURE (45)..(45): X is A or V
  MISC_FEATURE (46)..(46): X is K or R
  MISC_FEATURE (47)..(47): X is K, E or R
  MISC_FEATURE (48)..(48): X is S, A, T, or I
  MISC_FEATURE (50)..(50): X is R, Q, or K
  MISC_FEATURE (51)..(51): X is N, E, Q, or K
  MISC_FEATURE (52)..(52): X is H, A, K, or R
  MISC_FEATURE (54)..(54): X is D, N or G
  MISC_FEATURE (55)..(55): X is R, T, or S
XXXXXXXXXXXXXAXXXXXXXLXXXXXXXAXXXAXXALXXXAXXXXXXIXXXPXX

SEQ ID NO: 146 - protein, 55 aa, Artificial Sequence
  Synthetic
  MISC_FEATURE (1)..(1): X is Q, D, or E
  MISC_FEATURE (2)..(2): X is L, I, V or E
  MISC_FEATURE (4)..(4): X is K, I, Q or E
  MISC_FEATURE (5)..(55): X is K, Q or E
  MISC_FEATURE (7)..(7): X is I, A, or L
  MISC_FEATURE (8)..(8): X is R, K or E
  MISC_FEATURE (9)..(9): X is A or V
  MISC_FEATURE (11)..(11): X is A or V
  MISC_FEATURE (12)..(12): X is R, K or E
  MISC_FEATURE (13)..(13): X is L, A or T
  MISC_FEATURE (15)..(15): X is V, A, I or E
  MISC_FEATURE (16)..(16): X is R, Q or E
  MISC_FEATURE (17)..(17): X is I, A or L
  MISC_FEATURE (18)..(18): X is I, A or V
  MISC_FEATURE (19)..(19): X is R, K, Q or E
  MISC_FEATURE (20)..(20): X is L or E
  MISC_FEATURE (23)..(23): X is K, D, Q or E
  MISC_FEATURE (25)..(25): X is N or G
  MISC_FEATURE (26)..(26): X is N or D
  MISC_FEATURE (27)..(27): X is S or P
  MISC_FEATURE (28)..(28): X is D, K, Q or E
  MISC_FEATURE (29)..(29): X is L or V
  MISC_FEATURE (31)..(31): X is R, E, L or A
  MISC_FEATURE (32)..(32): X is R, K, N or E
  MISC_FEATURE (33)..(33): X is V, A, or I
  MISC_FEATURE (35)..(35): X is K, Q, R or E
  MISC_FEATURE (36)..(36): X is K, T or E
  MISC_FEATURE (39)..(39): X is K, R or E
  MISC_FEATURE (41)..(41): X is V or I
  MISC_FEATURE (43)..(43): X is Q, S, or E
  MISC_FEATURE (44)..(45): X is V or A
  MISC_FEATURE (46)..(46): X is K or Q
  MISC_FEATURE (48)..(48): X is A or I
  MISC_FEATURE (50)..(50): X is R or K
  MISC_FEATURE (52)..(52): X is R or A
  MISC_FEATURE (53)..(53): X is G or P
  MISC_FEATURE (54)..(54): X is D or N
  MISC_FEATURE (55)..(55): X is R or T
XXAXXAXXXLXXXAXXXXXXALXQXXXXXAXXXAXXALXAXAXXXXEXIXQXXXX

SEQ ID NO: 147 - protein, 55 aa, Artificial Sequence
  Synthetic
  MISC_FEATURE (1)..(1): X is D, S, or E
  MISC_FEATURE (2)..(2): X is L, I, V or E
  MISC_FEATURE (4)..(4): X is K, D or E
  MISC_FEATURE (5)..(5): X is K, D, R or E
  MISC_FEATURE (7)..(7): X is L, A, I or E
  MISC_FEATURE (8)..(8): X is R, K or Q
  MISC_FEATURE (9)..(9): X is L, V or A
  MISC_FEATURE (11)..(11): X is R, K, I or E
  MISC_FEATURE (12)..(12): X is R or E
  MISC_FEATURE (13)..(13): X is L, A or T
  MISC_FEATURE (15)..(15): X is R, K or E
  MISC_FEATURE (16)..(16): X is R, T or E
  MISC_FEATURE (17)..(17): X is I, A, or L
  MISC_FEATURE (18)..(18): X is I, A, V or R
  MISC_FEATURE (19)..(19): X is K, N or R
  MISC_FEATURE (20)..(20): X is L or E
  MISC_FEATURE (22)..(22): X is K, Q or E
  MISC_FEATURE (23)..(23): X is K, Q, D or E
  MISC_FEATURE (24)..(24): X is Q or H
  MISC_FEATURE (25)..(25): X is N or G
  MISC_FEATURE (26)..(26): X is N or D
  MISC_FEATURE (27)..(27): X is P, S, Q or D
  MISC_FEATURE (28)..(28): X is K, R, E or D
  MISC_FEATURE (29)..(29): X is L or V
  MISC_FEATURE (31)..(31): X is R, E, K or Q
  MISC_FEATURE (32)..(32): X is R, E, K or N
  MISC_FEATURE (33)..(33): X is V, I or A
  MISC_FEATURE (34)..(35): X is K, R or E
  MISC_FEATURE (36)..(36): X is Q, L, N or E
  MISC_FEATURE (38)..(38): X is R, E, D or K
  MISC_FEATURE (39)..(39): X is R, E, Q or K
  MISC_FEATURE (41)..(41): X is I or V
  MISC_FEATURE (42)..(42): X is K, N, R or E
  MISC_FEATURE (43)..(43): X is R or E
  MISC_FEATURE (44)..(44): X is V or A
  MISC_FEATURE (45)..(45): X is R, Q, D or E
  MISC_FEATURE (46)..(46): X is R, K, N or E
  MISC_FEATURE (47)..(47): X is Q, T, V or E
  MISC_FEATURE (48)..(48): X is L, K, R or E
  MISC_FEATURE (49)..(49): X is K or E
  MISC_FEATURE (50)..(50): X is K, R, N or E
  MISC_FEATURE (51)..(51): X is Q or E
  MISC_FEATURE (52)..(52): X is R or A
  MISC_FEATURE (54)..(54): X is G or N
  MISC_FEATURE (55)..(55): X is R or T
XXAXXAXXXLXXXAXXXXXXAXXXXXXXXAXXXXXXAXXAXXXXXXXXXXXXPXX

SEQ ID NO: 148 - protein, 55 aa, Artificial Sequence
  Synthetic
DEEVQRIREEVRRAIEEVRESLERNDSEEAEELAREALERVAEEVKESIKERPDR

SEQ ID NO: 149 - protein, 55 aa, Artificial Sequence
  Synthetic
DLAIEAIRALVRLAIEIVRLALEQNDSELAREVAEEALRAVAEVVKEAIRQRGDR

SEQ ID NO: 150 - protein, 55 aa, Artificial Sequence
  Synthetic
ELAKEAIRALRRLAEEIRRLAEEQNDDELAREVEELAREAIEEVRKELERQRPGR

SEQ ID NO: 151 - protein, 53 aa, Artificial Sequence
  Synthetic
  MISC_FEATURE (1)..(1): X is S, T, or D
  MISC_FEATURE (2)..(2): X is E, K, R or D
  MISC_FEATURE (3)..(3): X is V, A, L or T
  MISC_FEATURE (4)..(4): X is K, R, or E
  MISC_FEATURE (5)..(5): X is K, Q, T or E
  MISC_FEATURE (6)..(6): X is A, L, Q or S
  MISC_FEATURE (8)..(8): X is R, D, Q or E
  MISC_FEATURE (9)..(9): X is R, K, Q or E
  MISC_FEATURE (10)..(10): X is V or A
  MISC_FEATURE (11)..(11): X is I, K Q or E
  MISC_FEATURE (12)..(12): X is K, D or E
  MISC_FEATURE (13)..(13): X is R, A, L or E
  MISC_FEATURE (14)..(14): X is A or L
  MISC_FEATURE (15)..(15): X is Q, K, D or E
  MISC_FEATURE (16)..(16): X is N, K, R or E
  MISC_FEATURE (17)..(17): X is V, A or L
  MISC_FEATURE (18)..(18): X is I, K, R or E
  MISC_FEATURE (19)..(19): X is K, Q or E
  MISC_FEATURE (20)..(20): X is R, D, Q or E
  MISC_FEATURE (22)..(22): X is R, K, Q or E
  MISC_FEATURE (23)..(23): X is R, K, D or E
  MISC_FEATURE (24)..(24): X is Q, T, R or E
  MISC_FEATURE (26)..(26): X is T or V
  MISC_FEATURE (28)..(28): X is Q, S, D, or P
  MISC_FEATURE (29)..(29): X is E or D
  MISC_FEATURE (30)..(30): X is V, A or T
  MISC_FEATURE (31)..(31): X is L, I Q or V
  MISC_FEATURE (32)..(32): X is D, K, R or N
  MISC_FEATURE (33)..(33): X is E, Q, D, or A
  MISC_FEATURE (35)..(35): X is E, Q, K, or I
  MISC_FEATURE (36)..(36): X is E, Q, K, or R
  MISC_FEATURE (37)..(37): X is V or A
  MISC_FEATURE (38)..(38): X is V, I or A
  MISC_FEATURE (39)..(39): X is D, K, R or E
  MISC_FEATURE (40)..(40): X is D, K, L or E
  MISC_FEATURE (41)..(41): X is A, V or L
  MISC_FEATURE (42)..(42): X is R, Q, K or E
  MISC_FEATURE (43)..(43): X is R, Q or E
  MISC_FEATURE (44)..(44): X is L, A or V
  MISC_FEATURE (45)..(45): X is L, A, I or V
  MISC_FEATURE (46)..(46): X is Q, K or E
  MISC_FEATURE (47)..(47): X is Q, R, L or E
  MISC_FEATURE (49)..(49): X is K, R, N or E
  MISC_FEATURE (50)..(50): X is K or E
  MISC_FEATURE (51)..(51): X is S, A or L
  MISC_FEATURE (52)..(52): X is D, T, S or Q
  MISC_FEATURE (53)..(53): X is D, N or S
XXXXXXAXXXXXXXXXXXXXAXXXGXSXXXXXXIXXXXXXXXXXXXXAXXXXX

SEQ ID NO: 152 - protein, 53 aa, Artificial Sequence
  Synthetic
  MISC_FEATURE (1)..(1): X is Q, K, S or E
  MISC_FEATURE (2)..(2): X is R, K, D or E
  MISC_FEATURE (3)..(3): X is V or A
  MISC_FEATURE (5)..(5): X is K, E or A
  MISC_FEATURE (6)..(6): X is S, K, E or A
  MISC_FEATURE (9)..(9): X is Q, K, E or R
  MISC_FEATURE (10)..(10): X is V or A
  MISC_FEATURE (11)..(11): X is V, I, L or A
  MISC_FEATURE (12)..(12): X is R, E, K or A
  MISC_FEATURE (13)..(13): X is L, E, K or A
  MISC_FEATURE (14)..(14): X is L or A
  MISC_FEATURE (15)..(15): X is L or W
  MISC_FEATURE (16)..(16): X is K, Q, R or L
  MISC_FEATURE (17)..(17): X is V, A or L
  MISC_FEATURE (18)..(18): X is V, A, I or L
  MISC_FEATURE (19)..(19): X is Q, R, I or L
  MISC_FEATURE (20)..(20): X is Q, S, E or A
  MISC_FEATURE (23)..(23): X is Q, K, E or R
  MISC_FEATURE (24)..(24): X is Q, T, E or R
  MISC_FEATURE (26)..(26): X is T or V
  MISC_FEATURE (28)..(28): X is D, R, W or E
  MISC_FEATURE (29)..(29): X is D, K or E
  MISC_FEATURE (30)..(30): X is V or A
  MISC_FEATURE (31)..(31): X is V, L or I
  MISC_FEATURE (32)..(32): X is K, R, A or D
  MISC_FEATURE (33)..(33): X is E, L, K or D
  MISC_FEATURE (35)..(35): X is L or I
  MISC_FEATURE (36)..(36): X is R, E, K or T
  MISC_FEATURE (37)..(37): X is V or A
  MISC_FEATURE (38)..(38): X is V, I or A
  MISC_FEATURE (39)..(39): X is S, K, Q or A
  MISC_FEATURE (40)..(40): X is R, L, N or E
  MISC_FEATURE (41)..(41): X is A or V
  MISC_FEATURE (42)..(42): X is I or L
  MISC_FEATURE (43)..(43): X is K, R or E
  MISC_FEATURE (44)..(44): X is L, A, or V
  MISC_FEATURE (45)..(45): X is L, A, I or V
  MISC_FEATURE (46)..(46): X is L, E, K or Q
  MISC_FEATURE (47)..(47): X is I, E, K or Q
  MISC_FEATURE (49)..(49): X is I or L
  MISC_FEATURE (50)..(50): X is N, R, D or K
  MISC_FEATURE (51)..(51): X is S, A, or L
  MISC_FEATURE (52)..(52): X is S or T
  MISC_FEATURE (53)..(53): X is D, N, or S
XXXAXXALXXXXXXXXXXXXALXXGXSXXXXXXIXXXXXXXXXXXXXAXXXXX

SEQ ID NO: 153 - protein, 53 aa, Artificial Sequence
  Synthetic
  MISC_FEATURE (1)..(1): X is Q, E, R, or S
  MISC_FEATURE (2)..(2): X is E, D, or K
  MISC_FEATURE (3)..(3): X is E, D, T or K
  MISC_FEATURE (5)..(5): X is E, R, L or K
  MISC_FEATURE (6)..(6): X is E, D, R or K
  MISC_FEATURE (9)..(9): X is E, R or K
  MISC_FEATURE (10)..(10): X is E, D or K
  MISC_FEATURE (11)..(11): X is V, I, A or L
  MISC_FEATURE (12)..(12): X is R, A, K or E
  MISC_FEATURE (13)..(13): X is R, K or E
  MISC_FEATURE (14)..(14): X is S, A, or L
  MISC_FEATURE (15)..(15): X is W or L
  MISC_FEATURE (16)..(16): X is K, E, N or Q
  MISC_FEATURE (17)..(17): X is K, E, D or Q
  MISC_FEATURE (18)..(18): X is V, A, I or L
  MISC_FEATURE (19)..(19): X is Q, A, I or L
  MISC_FEATURE (20)..(20): X is K, Q, R or E
  MISC_FEATURE (21)..(21): X is A, Q, R or D
  MISC_FEATURE (22)..(22): X is L or Q
  MISC_FEATURE (23)..(23): X is K, R, N or E
  MISC_FEATURE (24)..(24): X is K, R, D or Q
  MISC_FEATURE (26)..(26): X is K, R, T or E
  MISC_FEATURE (28)..(28): X is D, R, P or E
  MISC_FEATURE (29)..(29): X is D, K or E
  MISC_FEATURE (30)..(30): X is D, K, Q or E
  MISC_FEATURE (31)..(31): X is L, I or V
  MISC_FEATURE (32)..(32): X is R, A, K or N
  MISC_FEATURE (33)..(33): X is E or K
  MISC_FEATURE (34)..(34): X is S, I, Q or T
  MISC_FEATURE (35)..(35): X is L or I
  MISC_FEATURE (36)..(37): X is R, K or E
  MISC_FEATURE (38)..(38): X is V, I, or A
  MISC_FEATURE (39)..(39): X is S, E, K or Q
  MISC_FEATURE (40)..(40): X is E, K or R
  MISC_FEATURE (41)..(41): X is N, T, V or R
  MISC_FEATURE (42)..(42): X is I or L
  MISC_FEATURE (43)..(43): X is R, K, E, or N
  MISC_FEATURE (44)..(44): X is R, K, Q, or E
  MISC_FEATURE (45)..(45): X is V, A, I or L
  MISC_FEATURE (46)..(46): X is K, E, I or L
  MISC_FEATURE (47)..(47): X is K, E, or R
  MISC_FEATURE (48)..(48): X is K, E, D or N
  MISC_FEATURE (49)..(49): X is I or L
  MISC_FEATURE (50)..(50): X is K, R, N or Q
  MISC_FEATURE (51)..(51): X is S or R
  MISC_FEATURE (52)..(52): X is P, S, or T
  MISC_FEATURE (53)..(53): X is S or D
XXXAXXALXXXXXXXXXXXXXXXXGXSXXXXXXXXXXXXXXXXXXXXXXXXXX

SEQ ID NO: 154 - protein, 53 aa, Artificial Sequence
  Synthetic
SEVEESAQEVEKRAQEVREEAERRGTSQEVLDEIKRVVDEARQLAQRAKESDD

SEQ ID NO: 155 - protein, 53 aa, Artificial Sequence
  Synthetic
SEVAESALQVVREALKVVLSALERGTSEEVLKEILRVVSEAIKLALEAIKSSD

SEQ ID NO: 156 - protein, 53 aa, Artificial Sequence
  Synthetic
SETARRALEKVRESLKEVLEQLERGTSEEELRESLREVSENIRKALEEIKSPD

SEQ ID NO: 157 - protein, 55 aa, Artificial Sequence
  Synthetic
  MISC_FEATURE (1)..(1): X is S, T, or N
  MISC_FEATURE (2)..(2): X is S, D, E or K
  MISC_FEATURE (3)..(3): X is V, A, I or T
  MISC_FEATURE (4)..(4): X is K, E or D
  MISC_FEATURE (5)..(5): X is K, R, N or E
  MISC_FEATURE (6)..(6): X is L or A
  MISC_FEATURE (7)..(7): X is L or E
  MISC_FEATURE (8)..(8): X is K, N, D or E
  MISC_FEATURE (9)..(9): X is K, R or E
  MISC_FEATURE (11)..(11): X is K, R, L or E
  MISC_FEATURE (12)..(12): X is K or E
  MISC_FEATURE (13)..(13): X is L or R
  MISC_FEATURE (14)..(14): X is M, L or A
  MISC_FEATURE (15)..(15): X is R, K or E
  MISC_FEATURE (16)..(16): X is Q, K or E
  MISC_FEATURE (17)..(17): X is L or A
  MISC_FEATURE (19)..(19): X is K, R, D, or E
  MISC_FEATURE (20)..(20): X is Q, R, L or E
  MISC_FEATURE (22)..(22): X is S, A, R, or K
  MISC_FEATURE (23)..(23): X is E, R, or K
  MISC_FEATURE (24)..(24): X is E, D, or Q
  MISC_FEATURE (26)..(26): X is S, A, Q, or N
  MISC_FEATURE (27)..(27): X is D, T or N
  MISC_FEATURE (28)..(28): X is E, P, S, or K
  MISC_FEATURE (29)..(29): X is E, D, N, or K
  MISC_FEATURE (30)..(30): X is E, R or K
  MISC_FEATURE (32)..(32): X is Q, N, R or K
  MISC_FEATURE (33)..(33): X is Q, E or K
  MISC_FEATURE (36)..(36): X is D, E or K
  MISC_FEATURE (37)..(37): X is D, E or K
  MISC_FEATURE (38)..(38): X is L, I or V
  MISC_FEATURE (39)..(40): X is Q, K, R or E
  MISC_FEATURE (41)..(41): X is L or A
  MISC_FEATURE (42)..(42): X is V, I or E
  MISC_FEATURE (43)..(43): X is Q, K, D or E
  MISC_FEATURE (44)..(44): X is R, K, D or E
  MISC_FEATURE (46)..(46): X is R, K, N or Q
  MISC_FEATURE (47)..(47): X is R, K or E
  MISC_FEATURE (48)..(48): X is E, A, Q or L
  MISC_FEATURE (50)..(50): X is E, D or K
  MISC_FEATURE (51)..(51): X is E, D, R or K
  MISC_FEATURE (52)..(52): X is T, S, or A
  MISC_FEATURE (54)..(54): X is T or A
  MISC_FEATURE (55)..(55): X is T, S or D
XXXXXXXXXAXXXXXXXAXXAXXXGXXXXXAXXLLXXXXXXXXXIXXXLXXXGXX

SEQ ID NO: 158 - protein, 55 aa, Artificial Sequence
  Synthetic
  MISC_FEATURE (1)..(1): X is S, N, K or D
  MISC_FEATURE (2)..(2): X is E, N, K or R
  MISC_FEATURE (3)..(3): X is V or A
  MISC_FEATURE (4)..(4): X is I, K, Q or A
  MISC_FEATURE (5)..(5): X is I, K, R or E
  MISC_FEATURE (6)..(6): X is L or A
  MISC_FEATURE (7)..(7): X is I or V
  MISC_FEATURE (9)..(9): X is K or E
  MISC_FEATURE (12)..(12): X is M or A
  MISC_FEATURE (14)..(14): X is M, L or A
  MISC_FEATURE (16)..(16): X is E, K, Q or R
  MISC_FEATURE (17)..(17): X is L or A
  MISC_FEATURE (19)..(19): X is L, V or A
  MISC_FEATURE (20)..(20): X is R, E, K or L
  MISC_FEATURE (23)..(23): X is R, E, K or D
  MISC_FEATURE (24)..(24): X is Q, E or D
  MISC_FEATURE (26)..(26): X is Q, A or S
  MISC_FEATURE (27)..(27): X is D, N or T
  MISC_FEATURE (29)..(29): X is E, A or K
  MISC_FEATURE (30)..(30): X is E, R or K
  MISC_FEATURE (32)..(32): X is M  A or L
  MISC_FEATURE (33)..(33): X is K or Q
  MISC_FEATURE (36)..(36): X is K, R or I
  MISC_FEATURE (37)..(37): X is D, E or K
  MISC_FEATURE (38)..(38): X is L, I or V
  MISC_FEATURE (40)..(40): X is R or E
  MISC_FEATURE (41)..(41): X is L or A
  MISC_FEATURE (42)..(42): X is V or I
  MISC_FEATURE (43)..(43): X is L or A
  MISC_FEATURE (44)..(44): X is E, R, or K
  MISC_FEATURE (46)..(46): X is L or I
  MISC_FEATURE (47)..(47): X is R, E, Q or D
  MISC_FEATURE (48)..(48): X is A, E or L
  MISC_FEATURE (50)..(50): X is R, E, K or T
  MISC_FEATURE (51)..(51): X is R, E, or K
  MISC_FEATURE (52)..(52): X is T, A or S
  MISC_FEATURE (55)..(55): X is T, D or S
XXXXXXXAXAIXLXAXXAXXAAXXGXXAXXAXXLLXXXLXXXXXIXXXLXXXGTX

SEQ ID NO: 159 - protein, 55 aa, Artificial Sequence
  Synthetic
  MISC_FEATURE (1)..(1): X is D, P, Q or K
  MISC_FEATURE (2)..(2): X is D, Q, T, or E
  MISC_FEATURE (3)..(3): X is Q, T, or E
  MISC_FEATURE (4)..(4): X is I, K, A, or Q
  MISC_FEATURE (5)..(5): X is I, K, E, or R
  MISC_FEATURE (6)..(6): X is N, K, E, or R
  MISC_FEATURE (7)..(7): X is V, T, N or D
  MISC_FEATURE (9)..(9): X is E, K, or R
  MISC_FEATURE (10)..(10): X is T, E, K, or R
  MISC_FEATURE (12)..(12): X is M or A
  MISC_FEATURE (13)..(13): X is R, D, or E
  MISC_FEATURE (14)..(14): X is R, A, L, or K
  MISC_FEATURE (16)..(16): X is R, E, Q, or K
  MISC_FEATURE (17)..(17): X is T, E, Q, or D
  MISC_FEATURE (19)..(19): X is L,V, K or N
  MISC_FEATURE (20)..(20): X is D, E, R or K
  MISC_FEATURE (21)..(21): X is Q, E, R or K
  MISC_FEATURE (23)..(23): X is D, E, R or K
  MISC_FEATURE (24)..(24): X is D, Q, R or K
  MISC_FEATURE (26)..(26): X is S, E, Q, or D
  MISC_FEATURE (27)..(27): X is N, T or D
  MISC_FEATURE (29)..(29): X is E, K, R or A
  MISC_FEATURE (30)..(30): X is Q, K, D or E
  MISC_FEATURE (32)..(32): X is M, A or L
  MISC_FEATURE (33)..(33): X is K, E or Q
  MISC_FEATURE (34)..(34): X is K, E, R or N
  MISC_FEATURE (36)..(36): X is K, I, R or L
  MISC_FEATURE (37)..(37): X is K, E or D
  MISC_FEATURE (38)..(38): X is K, E, Q or R
  MISC_FEATURE (40)..(40): X is K, E or R
  MISC_FEATURE (41)..(41): X is K, N or R
  MISC_FEATURE (42)..(42): X is I, Q or T
  MISC_FEATURE (43)..(43): X is L or A
  MISC_FEATURE (44)..(45): X is E, R or K
  MISC_FEATURE (46)..(46): X is L or I
  MISC_FEATURE (47)..(47): X is R, E, Q, or K
  MISC_FEATURE (48)..(48): X is R, E, N, or K
  MISC_FEATURE (49)..(49): X is R, E, L, or K
  MISC_FEATURE (50)..(50): X is R or K
  MISC_FEATURE (51)..(51): X is E, D, N or K
  MISC_FEATURE (52)..(52): X is E, Q, N or K
  MISC_FEATURE (55)..(55): X is D or T
XXXXXXXAXXIXXXAXXAXXXAXXGXXAXXAXXXLXXXLXXXXXXXXXXXXXGTX

SEQ ID NO: 160 - protein, 55 aa, Artificial Sequence
  Synthetic
STVKELLDRARELMRELAERASEQGSDEEEARKLLEDLEQLVQEIRRELEETGTS

SEQ ID NO: 161 - protein, 55 aa, Artificial Sequence
  Synthetic
SEVIRLIAKAIMLMAELALRAAEQGSDAEEAMKLLKDLLRLVLEILRELRETGTD

SEQ ID NO: 162 - protein, 55 aa, Artificial Sequence
  Synthetic
KEEIRKVAEEIMRRAKTALDEARQGSDAEEAMKRLKEQLRRILERLREEREKGTD

SEQ ID NO: 163 - protein, 42 aa, Artificial Sequence
  Synthetic
  MISC_FEATURE (2)..(2): X is S or D
  MISC_FEATURE (3)..(3): X is Y or A
  MISC_FEATURE (4)..(4): X is T or E
  MISC_FEATURE (5)..(5): X is K, R or E
  MISC_FEATURE (6)..(6): X is Q, K, R or E
  MISC_FEATURE (8)..(8): X is R, A or N
  MISC_FEATURE (9)..(9): X is R, K, D or E
  MISC_FEATURE (10)..(10): X is A or L
  MISC_FEATURE (11)..(11): X is A or V
  MISC_FEATURE (12)..(12): X is K, I, A or E
  MISC_FEATURE (13)..(13): X is K, R, D or E
  MISC_FEATURE (14)..(14): X is Y or W
  MISC_FEATURE (15)..(15): X is V, A, or T
  MISC_FEATURE (16)..(16): X is K, E, R or Q
  MISC_FEATURE (17)..(17): X is K or E
  MISC_FEATURE (18)..(18): X is K, Q or E
  MISC_FEATURE (20)..(20): X is G, Q or Y
  MISC_FEATURE (21)..(21): X is S or T
  MISC_FEATURE (22)..(22): X is E or P
  MISC_FEATURE (23)..(23): X is E or D
  MISC_FEATURE (24)..(24): X is E, Q or R
  MISC_FEATURE (26)..(27): X is E, K or R
  MISC_FEATURE (28)..(28): X is E, D, I or N
  MISC_FEATURE (30)..(30): X is E, K or N
  MISC_FEATURE (31)..(31): X is E, K or R
  MISC_FEATURE (32)..(32): X is V or L
  MISC_FEATURE (33)..(33): X is V, R, K or E
  MISC_FEATURE (34)..(34): X is Q, R, K or E
  MISC_FEATURE (35)..(35): X is R, K or E
  MISC_FEATURE (36)..(36): X is I, A or L
  MISC_FEATURE (37)..(37): X is R, K, or E
  MISC_FEATURE (38)..(38): X is D, K, N or Q
  MISC_FEATURE (39)..(39): X is K, E or Q
  MISC_FEATURE (41)..(41): X is S, N, D or E
DXXXXXAXXXXXXXXXXXGXXXXXAXXXAXXXXXXXXXXAXD

SEQ ID NO: 164 - protein, 41 aa, Artificial Sequence
  Synthetic
  MISC_FEATURE (1)..(1): X is S, D or Q
  MISC_FEATURE (2)..(2): X is Y or A
  MISC_FEATURE (4)..(4): X is I or L
  MISC_FEATURE (5)..(5): X is Q, E or R
  MISC_FEATURE (10)..(10): X is V or A
  MISC_FEATURE (11)..(11): X is V, I or A
  MISC_FEATURE (13)..(13): X is Y or W
  MISC_FEATURE (14)..(14): X is V or A
  MISC_FEATURE (15)..(15): X is I or L
  MISC_FEATURE (16)..(16): X is E, K or N
  MISC_FEATURE (17)..(17): X is E, K or Q
  MISC_FEATURE (19)..(19): X is G, Y or Q
  MISC_FEATURE (20)..(20): X is S, D, or T
  MISC_FEATURE (22)..(22): X is E or D
  MISC_FEATURE (23)..(23): X is E, R or D
  MISC_FEATURE (25)..(25): X is V or A
  MISC_FEATURE (26)..(26): X is K, R or E
  MISC_FEATURE (27)..(27): X is I, Q, R or E
  MISC_FEATURE (29)..(29): X is S, R or E
  MISC_FEATURE (30)..(30): X is K, Q, R or E
  MISC_FEATURE (31)..(31): X is V or L
  MISC_FEATURE (33)..(34): X is R, K or E
  MISC_FEATURE (35)..(35): X is I, A or L
  MISC_FEATURE (36)..(36): X is K, E or Q
  MISC_FEATURE (37)..(37): X is K, E, N or T
  MISC_FEATURE (38)..(38): X is K, N or Q
  MISC_FEATURE (40)..(40): X is D, N or R
XXLXXAAAAXXAXXXXXGXXPXXAXXXAXXXVXXXXXXAXD

SEQ ID NO: 165 - protein, 40 aa, Artificial Sequence
  Synthetic
  MISC_FEATURE (1)..(1): X is R or D
  MISC_FEATURE (2)..(2): X is E, D or S
  MISC_FEATURE (4)..(4): X is I or L
  MISC_FEATURE (5)..(5): X is R, E, K or Q
  MISC_FEATURE (6)..(6): X is R, S, K or Q
  MISC_FEATURE (9)..(9): X is R, E, K or Q
  MISC_FEATURE (10)..(10): X is R, E, K or Q
  MISC_FEATURE (11)..(11): X is V, A or I
  MISC_FEATURE (13)..(13): X is E, R, D, or K
  MISC_FEATURE (14)..(14): X is V, A, E, or Q
  MISC_FEATURE (15)..(15): X is I or L
  MISC_FEATURE (16)..(16): X is E, K or R
  MISC_FEATURE (17)..(17): X is Q, N, K or R
  MISC_FEATURE (19)..(19): X is Q, N, K or G
  MISC_FEATURE (20)..(20): X is S or T
  MISC_FEATURE (22)..(22): X is E or D
  MISC_FEATURE (23)..(23): X is E, Q, K, or R
  MISC_FEATURE (25)..(25): X is V or A
  MISC_FEATURE (26)..(26): X is K, R or Q
  MISC_FEATURE (27)..(27): X is E or N
  MISC_FEATURE (29)..(29): X is E or K
  MISC_FEATURE (30)..(30): X is R, E or K
  MISC_FEATURE (31)..(31): X is L, Q, E or R
  MISC_FEATURE (33)..(33): X is K or R
  MISC_FEATURE (34)..(34): X is K, E or R
  MISC_FEATURE (35)..(35): X is Q, E or D
  MISC_FEATURE (36)..(36): X is Q, E or K
  MISC_FEATURE (37)..(37): X is N, Q, E or K
  MISC_FEATURE (38)..(38): X is N, D, E or K
  MISC_FEATURE (39)..(39): X is S or R
  MISC_FEATURE (40)..(40): X is D, T or N
XXLXXXAAXXXAXXXXXGXXPXXAXXXAXXXVXXXXXXXX

SEQ ID NO: 166 - protein, 42 aa, Artificial Sequence
  Synthetic
DSYTERARKAVKRYVKEEGGSEEEAEREAEKVREEIRKKASD

SEQ ID NO: 167 - protein, 41 aa, Artificial Sequence
  Synthetic
SYLIQAAAAVVAYVIEEGGSPEEAVKIAEEVVRRIKEKADD

SEQ ID NO: 168 - protein, 40 aa, Artificial Sequence
  Synthetic
RELIRRAAERVAEVIERGGSPEEAVKEAEKEVKKQKEESD

SEQ ID NO: 169 - protein, 41 aa, Artificial Sequence
  Synthetic
  MISC_FEATURE (1)..(1): X is S, D, or T
  MISC_FEATURE (2)..(2): X is I, A, Q or T
  MISC_FEATURE (3)..(3): X is Q or E
  MISC_FEATURE (4)..(4): X is D, K, Q or E
  MISC_FEATURE (5)..(5): X is D, R, Q or K
  MISC_FEATURE (7)..(7): X is A or K
  MISC_FEATURE (8)..(8): X is Q, N, R, or E
  MISC_FEATURE (9)..(9): X is S or A
  MISC_FEATURE (11)..(11): X is I or R
  MISC_FEATURE (12)..(12): X is K, E or R
  MISC_FEATURE (13)..(13): X is K, W or Y
  MISC_FEATURE (14)..(14): X is V, A or E
  MISC_FEATURE (15)..(15): X is K, Q, R or E
  MISC_FEATURE (16)..(16): X is K, Q, N or E
  MISC_FEATURE (17)..(17): X is K, Q, R or E
  MISC_FEATURE (19)..(19): X is K, Y or G
  MISC_FEATURE (20)..(20): X is S, N or D
  MISC_FEATURE (21)..(22): X is E or D
  MISC_FEATURE (23)..(23): X is E, K or Q
  MISC_FEATURE (25)..(25): X is R, K or Q
  MISC_FEATURE (26)..(26): X is E, R, K or N
  MISC_FEATURE (27)..(27): X is E, R, K or L
  MISC_FEATURE (29)..(29): X is E or K
  MISC_FEATURE (30)..(30): X is E, R, Q or K
  MISC_FEATURE (31)..(31): X is V, A or T
  MISC_FEATURE (32)..(32): X is E, R, I  or Q
  MISC_FEATURE (33)..(33): X is E, R, K  or Q
  MISC_FEATURE (34)..(34): X is E, R, D  or I
  MISC_FEATURE (35)..(35): X is L or I
  MISC_FEATURE (36)..(36): X is K, R or Q
  MISC_FEATURE (37)..(37): X is K, R, T or D
  MISC_FEATURE (38)..(38): X is K, N, E or S
  MISC_FEATURE (40)..(40): X is K, N, E or D
  MISC_FEATURE (41)..(41): X is T, S or D
XXXXXAXXXVXXXXXXXGXXXXXAXXXAXXXXXXXXXXAXX

SEQ ID NO: 170 - protein, 41 aa, Artificial Sequence
  Synthetic
  MISC_FEATURE (1)..(1): X is S or D
  MISC_FEATURE (2)..(2): X is T, A or Q
  MISC_FEATURE (4)..(4): X is V, I, K or A
  MISC_FEATURE (4)..(41): X is D or S
  MISC_FEATURE (5)..(5): X is R, K, or L
  MISC_FEATURE (12)..(12): X is L, Y, A, or W
  MISC_FEATURE (13)..(13): X is Y, A, or W
  MISC_FEATURE (14)..(14): X is A, or V
  MISC_FEATURE (16)..(17): X is E, K or Q
  MISC_FEATURE (19)..(19): X is G or Y
  MISC_FEATURE (20)..(20): X is S, N or D
  MISC_FEATURE (21)..(21): X is T or V
  MISC_FEATURE (22)..(22): X is E or D
  MISC_FEATURE (23)..(23): X is E or T
  MISC_FEATURE (25)..(25): X is V, I or L
  MISC_FEATURE (26)..(26): X is Q, K, R, or E
  MISC_FEATURE (27)..(27): X is Q, K, R, or I
  MISC_FEATURE (29)..(29): X is K, R, or E
  MISC_FEATURE (30)..(30): X is Q, R, or E
  MISC_FEATURE (31)..(31): X is V, A, or T
  MISC_FEATURE (33)..(33): X is E, K or R
  MISC_FEATURE (34)..(34): X is K, D, N or R
  MISC_FEATURE (35)..(35): X is L or I
  MISC_FEATURE (36)..(36): X is K, E or Q
  MISC_FEATURE (37)..(37): X is K, N or T
  MISC_FEATURE (38)..(38): X is K, Q, D or E
  MISC_FEATURE (40)..(40): X is N, K, D or S
XXLXXAAAAVVXXXLXXGXXXXXAXXXAXXXIXXXXXXAXX

SEQ ID NO: 171 - protein, 41 aa, Artificial Sequence
  Synthetic
  MISC_FEATURE (1)..(1): X is E or D
  MISC_FEATURE (2)..(2): X is E, S, K or D
  MISC_FEATURE (3)..(3): X is E, L or Q
  MISC_FEATURE (4)..(4): X is V, I, K or A
  MISC_FEATURE (5)..(5): X is R, I, K or N
  MISC_FEATURE (6)..(6): X is E, K, S or T
  MISC_FEATURE (9)..(9): X is K, N, R, or Q
  MISC_FEATURE (10)..(10): X is E, V, R, or Q
  MISC_FEATURE (12)..(12): X is L, A, W or Y
  MISC_FEATURE (13)..(13): X is K, E or Q
  MISC_FEATURE (14)..(14): X is V, A or T
  MISC_FEATURE (16)..(16): X is D, N, Q or E
  MISC_FEATURE (17)..(17): X is D, R, K or E
  MISC_FEATURE (19)..(19): X is G or Y
  MISC_FEATURE (20)..(20): X is S, N, or D
  MISC_FEATURE (21)..(21): X is V or T
  MISC_FEATURE (22)..(22): X is E, D, or Q
  MISC_FEATURE (23)..(23): X is E or Q
  MISC_FEATURE (25)..(25): X is V, I or L
  MISC_FEATURE (26)..(26): X is E, K, T or D
  MISC_FEATURE (27)..(27): X is E or R
  MISC_FEATURE (29)..(29): X is E, K or R
  MISC_FEATURE (30)..(30): X is Q, E, K or R
  MISC_FEATURE (31)..(31): X is Q, E, A or R
  MISC_FEATURE (33)..(34): X is K, E or R
  MISC_FEATURE (35)..(35): X is L, D, E or R
  MISC_FEATURE (36)..(36): X is Q, K, E, or S
  MISC_FEATURE (37)..(37): X is T, K, E, or N
  MISC_FEATURE (38)..(38): X is R, K, E, or N
  MISC_FEATURE (39)..(39): X is R, A or S
  MISC_FEATURE (40)..(40): X is D, T or N
XXXXXXAAXXVXXXLXXGXXXXXAXXXAXXXIXXXXXXXXD

SEQ ID NO: 172 - protein, 41 aa, Artificial Sequence
  Synthetic
SIQEKAKQSVIRKVKEEGGSEEEARERAKEVEERLKKEADD

SEQ ID NO: 173 - protein, 41 aa, Artificial Sequence
  Synthetic
STLVRAAAAVVLYVLEKGGSTEEAVQRAREVIERLKKEASD

SEQ ID NO: 174 - protein, 41 aa, Artificial Sequence
  Synthetic
EELIREAAKEVLKVLEEGGSVEEAVERARERIEELQKRSDD

SEQ ID NO: 175 - protein, 41 aa, Artificial Sequence
  Synthetic
  MISC_FEATURE (1)..(1): X is S, D, T or N
  MISC_FEATURE (2)..(2): X is E, A, or L
  MISC_FEATURE (3)..(3): X is T, E, L or S
  MISC_FEATURE (4)..(4): X is E or K
  MISC_FEATURE (5)..(5): X is E, D or K
  MISC_FEATURE (7)..(7): X is A, N or K
  MISC_FEATURE (8)..(8): X is E, R or K
  MISC_FEATURE (9)..(9): X is R or L
  MISC_FEATURE (10)..(10): X is V or A
  MISC_FEATURE (11)..(11): X is E, K or A
  MISC_FEATURE (12)..(12): X is E, K, R or Q
  MISC_FEATURE (13)..(13): X is W, K, A or Q
  MISC_FEATURE (14)..(14): X is V, A or T
  MISC_FEATURE (15)..(15): X is K, Q, or R
  MISC_FEATURE (16)..(16): X is K, N, D or Q
  MISC_FEATURE (17)..(17): X is E, R, D or Q
  MISC_FEATURE (19)..(19): X is G, K or Q
  MISC_FEATURE (20)..(20): X is S, N, or D
  MISC_FEATURE (21)..(21): X is P or D
  MISC_FEATURE (22)..(22): X is E or D
  MISC_FEATURE (23)..(23): X is E, R or Q
  MISC_FEATURE (25)..(25): X is E, K or Q
  MISC_FEATURE (26)..(26): X is R, E, K or Q
  MISC_FEATURE (27)..(27): X is T, E, K or L
  MISC_FEATURE (29)..(29): X is D, K or R
  MISC_FEATURE (30)..(30): X is E, K or R
  MISC_FEATURE (31)..(31): X is V or A
  MISC_FEATURE (32)..(32): X is V, T, R,  or E
  MISC_FEATURE (33)..(33): X is K, D or E
  MISC_FEATURE (34)..(34): X is K, R, D or E
  MISC_FEATURE (36)..(36): X is K, R, or T
  MISC_FEATURE (37)..(37): X is E, K, R, or T
  MISC_FEATURE (38)..(38): X is E, A, Q, or N
  MISC_FEATURE (39)..(39): X is S or A
  MISC_FEATURE (40)..(40): X is Q, D, H, or R
  MISC_FEATURE (41)..(41): X is D, S, or T
XXXXXVXXXXXXXXXXXGXXXXXAXXXAXXXXXXLXXXXXX

SEQ ID NO: 176 - protein, 41 aa, Artificial Sequence
  Synthetic
  MISC_FEATURE (1)..(1): X is S, D or E
  MISC_FEATURE (2)..(2): X is T, L ,A, or E
  MISC_FEATURE (4)..(4): X is L ,A, or R
  MISC_FEATURE (5)..(5): X is K, Q, R, or E
  MISC_FEATURE (10)..(10): X is V or A
  MISC_FEATURE (12)..(12): X is S, K or A
  MISC_FEATURE (13)..(13): X is W, E, L or A
  MISC_FEATURE (14)..(14): X is V or A
  MISC_FEATURE (16)..(16): X is D, K or E
  MISC_FEATURE (17)..(17): X is D, K, Q or E
  MISC_FEATURE (19)..(19): X is Q or G
  MISC_FEATURE (20)..(20): X is S, T, N, or D
  MISC_FEATURE (22)..(22): X is E or D
  MISC_FEATURE (23)..(23): X is E or Q
  MISC_FEATURE (25)..(25): X is A or V
  MISC_FEATURE (26)..(26): X is E, K or R
  MISC_FEATURE (27)..(27): X is E, K, Q or T
  MISC_FEATURE (29)..(29): X is E, K, R or A
  MISC_FEATURE (30)..(30): X is E or R
  MISC_FEATURE (31)..(31): X is A or V
  MISC_FEATURE (33)..(33): X is K, R, E, or D
  MISC_FEATURE (34)..(34): X is K, R, E, or D
  MISC_FEATURE (36)..(36): X is R, T, or K
  MISC_FEATURE (37)..(37): X is R, E, D, or K
  MISC_FEATURE (38)..(38): X is S, Q, A, or T
  MISC_FEATURE (40)..(40): X is S, Q, or H
XXLXXVAALXAXXXLXXGXXPXXAXXXAXXXVXXLXXXAXD

SEQ ID NO: 177 - protein, 41 aa, Artificial Sequence
  Synthetic
  MISC_FEATURE (1)..(1): X is E or D
  MISC_FEATURE (2)..(2): X is E, K, N or D
  MISC_FEATURE (4)..(4): X is L, A, or R
  MISC_FEATURE (5)..(5): X is K, E, or Q
  MISC_FEATURE (6)..(6): X is K, E, R or D
  MISC_FEATURE (9)..(9): X is K, E, R or Q
  MISC_FEATURE (10)..(10): X is R, E, K or Q
  MISC_FEATURE (12)..(12): X is E or A
  MISC_FEATURE (13)..(13): X is E, K, R or Q
  MISC_FEATURE (14)..(14): X is S, V, A, or T
  MISC_FEATURE (16)..(16): X is R, E, K, or Q
  MISC_FEATURE (17)..(17): X is R, D, K, or Q
  MISC_FEATURE (19)..(19): X is G, K, or Q
  MISC_FEATURE (20)..(20): X is S, N, T, or D
  MISC_FEATURE (22)..(22): X is E or D
  MISC_FEATURE (23)..(23): X is E, Q or R
  MISC_FEATURE (25)..(25): X is A or V
  MISC_FEATURE (26)..(26): X is E, R, or K
  MISC_FEATURE (27)..(27): X is E, R, or N
  MISC_FEATURE (29)..(29): X is E, R, A or K
  MISC_FEATURE (30)..(30): X is E, R, or K
  MISC_FEATURE (31)..(31): X is E, R, Q or H
  MISC_FEATURE (33)..(33): X is E, R, or K
  MISC_FEATURE (34)..(34): X is Q, E, R, or K
  MISC_FEATURE (35)..(35): X is Q, E, R, or K
  MISC_FEATURE (36)..(36): X is Q, T, N, or K
  MISC_FEATURE (37)..(37): X is R, E, N, or K
  MISC_FEATURE (38)..(38): X is R, E, or K
  MISC_FEATURE (40)..(40): X is Q or T
  MISC_FEATURE (41)..(41): X is D or K
XXLXXXAAXXAXXXLXXGXXPXXAXXXAXXXVXXXXXXSXX

SEQ ID NO: 178 - protein, 41 aa, Artificial Sequence
  Synthetic
SETEEVKKLVEEKVKKEGGSPEEAKETAKEVTEELKEESQD

SEQ ID NO: 179 - protein, 41 aa, Artificial Sequence
  Synthetic
STLLKVAALVASAVLKEGGSPEEAAETAKEVVKELRKSASD

SEQ ID NO: 180 - protein, 41 aa, Artificial Sequence
  Synthetic
EELLKEAARQAEESLRQGKSPEEAAEEAKKEVKKLKEKSQD

SEQ ID NO: 181 - protein, 41 aa, Artificial Sequence
  Synthetic
  MISC_FEATURE (1)..(1): X is S, N or T
  MISC_FEATURE (2)..(2): X is E, D or T
  MISC_FEATURE (3)..(3): X is E, Q, K, or R
  MISC_FEATURE (4)..(4): X is E, Q, K, or D
  MISC_FEATURE (5)..(5): X is E, Q, or K
  MISC_FEATURE (6)..(6): X is V or A
  MISC_FEATURE (8)..(8): X is K, R, Q or E
  MISC_FEATURE (9)..(9): X is W, L, Q or E
  MISC_FEATURE (11)..(11): X is S or A
  MISC_FEATURE (12)..(12): X is R, E,D, or K
  MISC_FEATURE (13)..(13): X is Y or W
  MISC_FEATURE (15)..(15): X is K, S,R or Q
  MISC_FEATURE (16)..(16): X is K, N, R or E
  MISC_FEATURE (19)..(19): X is G, H, or Q
  MISC_FEATURE (20)..(20): X is D or N
  MISC_FEATURE (22)..(22): X is E or N
  MISC_FEATURE (23)..(23): X is K, D, E or Q
  MISC_FEATURE (24)..(24): X is S or A
  MISC_FEATURE (25)..(25): X is R, L or K
  MISC_FEATURE (26)..(26): X is E or K
  MISC_FEATURE (27)..(27): X is D, R, E or K
  MISC_FEATURE (29)..(29): X is N, R, E or K
  MISC_FEATURE (30)..(30): X is R, E or K
  MISC_FEATURE (33)..(33): X is E or K
  MISC_FEATURE (34)..(34): X is E, L or Q
  MISC_FEATURE (35)..(35): X is V or A
  MISC_FEATURE (36)..(36): X is K, R, E, or N
  MISC_FEATURE (37)..(37): X is K or R
  MISC_FEATURE (38)..(38): X is Q or A
  MISC_FEATURE (40)..(40): X is T, Q or S
  MISC_FEATURE (41)..(41): X is T or S
XXXXXXAXXAXXXAXXQGXXPXXXXXXAXXALXXXXXXAXX

SEQ ID NO: 182 - protein, 41 aa, Artificial Sequence
  Synthetic
  MISC_FEATURE (1)..(1): X is S or D
  MISC_FEATURE (2)..(2): X is E or D
  MISC_FEATURE (3)..(3): X is A or D
  MISC_FEATURE (4)..(4): X is L, E, I or K
  MISC_FEATURE (5)..(5): X is Q, R or K
  MISC_FEATURE (6)..(6): X is V or A
  MISC_FEATURE (9)..(9): X is E, L or W
  MISC_FEATURE (12)..(12): X is E, R or K
  MISC_FEATURE (13)..(13): X is Y or W
  MISC_FEATURE (15)..(15): X is S, H, Y or R
  MISC_FEATURE (16)..(16): X is E, K, N, or Q
  MISC_FEATURE (17)..(17): X is E or Q
  MISC_FEATURE (19)..(19): X is E or Q
  MISC_FEATURE (20)..(20): X is D or N
  MISC_FEATURE (23)..(23): X is D, E or K
  MISC_FEATURE (26)..(26): X is Q, R, E or K
  MISC_FEATURE (27)..(27): X is R or E
  MISC_FEATURE (30)..(30): X is R, K or E
  MISC_FEATURE (33)..(33): X is K or E
  MISC_FEATURE (34)..(34): X is K, Q or E
  MISC_FEATURE (35)..(35): X is V or A
  MISC_FEATURE (36)..(36): X is R, K or N
  MISC_FEATURE (37)..(37): X is R or K
  MISC_FEATURE (38)..(38): X is A or S
  MISC_FEATURE (40)..(40): X is T or E
  MISC_FEATURE (41)..(41): X is T or S
XXXXXXALXAAXXAXXXGXXPAXALXXAAXALXXXXXXAXX

SEQ ID NO: 183 - protein, 41 aa, Artificial Sequence
  Synthetic
  MISC_FEATURE (1)..(2): X is E or D
  MISC_FEATURE (3)..(3): X is A or D
  MISC_FEATURE (4)..(4): X is L, E, K or I
  MISC_FEATURE (5)..(5): X is E, K or Q
  MISC_FEATURE (6)..(6): X is E, K, R or Q
  MISC_FEATURE (9)..(9): X is E, K, R or D
  MISC_FEATURE (10)..(10): X is E or R
  MISC_FEATURE (12)..(12): X is E, K, D or R
  MISC_FEATURE (13)..(13): X is E, K, or R
  MISC_FEATURE (15)..(15): X is S, A, Y or Q
  MISC_FEATURE (16)..(16): X is E, K, N or Q
  MISC_FEATURE (17)..(17): X is E, D, N or Q
  MISC_FEATURE (19)..(19): X is E or Q
  MISC_FEATURE (20)..(20): X is N or D
  MISC_FEATURE (23)..(23): X is E, Q or D
  MISC_FEATURE (24)..(24): X is S or A
  MISC_FEATURE (26)..(26): X is K, E, H or Q
  MISC_FEATURE (27)..(27): X is K, E, R or Q
  MISC_FEATURE (30)..(31): X is K, E, or R
  MISC_FEATURE (33)..(33): X is K or E
  MISC_FEATURE (34)..(34): X is K, Q, R or E
  MISC_FEATURE (35)..(35): X is K, Q, R or E
  MISC_FEATURE (36)..(36): X is K, S or N
  MISC_FEATURE (37)..(37): X is K, E or R
  MISC_FEATURE (38)..(38): X is K or E
  MISC_FEATURE (40)..(40): X is S, T, or Q
  MISC_FEATURE (41)..(41): X is D, T, or R
XXXXXXALXXAXXAXXXGXXPAXXLXXAAXXLXXXXXXSXX

SEQ ID NO: 184 - protein, 41 aa, Artificial Sequence
  Synthetic
SEEDEVAKQASRYAKEQGGDPEKSREEAEKALEEVKKQATS

SEQ ID NO: 185 - protein, 41 aa, Artificial Sequence
  Synthetic
SEALQVALEAARYASEEGEDPAEALKEAARALEEVRRSATS

SEQ ID NO: 186 - protein, 41 aa, Artificial Sequence
  Synthetic
EEDLKEALDRAREASERGQNPAESLKEAAEELKKKKEKSSD

SEQ ID NO: 187 - protein, 41 aa, Artificial Sequence
  Synthetic
  MISC_FEATURE (1)..(1): X is S or T
  MISC_FEATURE (2)..(2): X is D, E, or N
  MISC_FEATURE (4)..(4): X is D, E, or K
  MISC_FEATURE (8)..(8): X is N, Q, E, or K
  MISC_FEATURE (9)..(9): X is N, Q, E, or R
  MISC_FEATURE (10)..(10): X is F or Y
  MISC_FEATURE (11)..(11): X is V or I
  MISC_FEATURE (12)..(12): X is K, R, E or D
  MISC_FEATURE (13)..(13): X is Q, K, E or D
  MISC_FEATURE (14)..(14): X is E or Q
  MISC_FEATURE (15)..(15): X is E, T or K
  MISC_FEATURE (16)..(16): X is K, D, R or E
  MISC_FEATURE (19)..(19): X is K, R or Q
  MISC_FEATURE (20)..(20): X is N, T, D, or S
  MISC_FEATURE (21)..(21): X is P, E, or R
  MISC_FEATURE (22)..(23): X is D, K, E, or Q
  MISC_FEATURE (25)..(25): X is K or R
  MISC_FEATURE (26)..(26): X is K, E, D or R
  MISC_FEATURE (27)..(27): X is S, E, or D
  MISC_FEATURE (29)..(29): X is K, E, or R
  MISC_FEATURE (30)..(30): X is K or E
  MISC_FEATURE (32)..(33): X is K, R or E
  MISC_FEATURE (34)..(34): X is K, R or D
  MISC_FEATURE (36)..(36): X is K, R or E
  MISC_FEATURE (37)..(37): X is K, R, N or T
  MISC_FEATURE (38)..(38): X is S or A
XXLXKALXXXXXXXXXKGXXXXXAXXXAXXLXXXLXXXAGS

SEQ ID NO: 188 - protein, 41 aa, Artificial Sequence
  Synthetic
  MISC_FEATURE (1)..(1): X is S or D
  MISC_FEATURE (2)..(2): X is A, K, N or D
  MISC_FEATURE (5)..(5): X is T, K, E, or Q
  MISC_FEATURE (9)..(9): X is T, K, D, or R
  MISC_FEATURE (10)..(10): X is F or Y
  MISC_FEATURE (13)..(13): X is E, Q, or D
  MISC_FEATURE (14)..(14): X is E or Q
  MISC_FEATURE (16)..(16): X is R, K, E or Q
  MISC_FEATURE (19)..(19): X is R, K, or Q
  MISC_FEATURE (20)..(20): X is N, T, or D
  MISC_FEATURE (23)..(23): X is E or K
  MISC_FEATURE (26)..(26): X is R or K
  MISC_FEATURE (27)..(27): X is E or S
  MISC_FEATURE (30)..(30): X is E or K
  MISC_FEATURE (33)..(33): X is E or Q
  MISC_FEATURE (34)..(34): X is K, N or R
  MISC_FEATURE (36)..(36): X is K, Q or R
  MISC_FEATURE (37)..(37): X is K, N or R
  MISC_FEATURE (38)..(38): X is S or A
XXLLXALAXXVLXXVXKGXXPEXAVXXAIXLAXXLXXXAGS

SEQ ID NO: 189 - protein, 41 aa, Artificial Sequence
  Synthetic
  MISC_FEATURE (1)..(1): X is S or D
  MISC_FEATURE (2)..(2): X is E, Q, S or D
  MISC_FEATURE (3)..(3): X is E or Q
  MISC_FEATURE (5)..(5): X is E, R, T or K
  MISC_FEATURE (6)..(6): X is E or K
  MISC_FEATURE (9)..(9): X is T, R, E or K
  MISC_FEATURE (10)..(10): X is S, H, E or K
  MISC_FEATURE (13)..(13): X is E or K
  MISC_FEATURE (14)..(14): X is E, R, A or L
  MISC_FEATURE (16)..(16): X is K, Q or E
  MISC_FEATURE (17)..(17): X is K or R
  MISC_FEATURE (19)..(19): X is E, Q, T or R
  MISC_FEATURE (20)..(20): X is N, T or D
  MISC_FEATURE (22)..(22): X is K or E
  MISC_FEATURE (23)..(23): X is K, D, R or E
  MISC_FEATURE (26)..(26): X is K, R or E
  MISC_FEATURE (27)..(27): X is K, R, D or E
  MISC_FEATURE (30)..(30): X is K, R or E
  MISC_FEATURE (31)..(31): X is K, Q, N or E
  MISC_FEATURE (33)..(33): X is K, Q,  or E
  MISC_FEATURE (34)..(34): X is K, R  or E
  MISC_FEATURE (35)..(35): X is D, K, R  or E
  MISC_FEATURE (36)..(36): X is K, R  or N
  MISC_FEATURE (37)..(37): X is K, R, E  or N
  MISC_FEATURE (38)..(38): X is K, R, T  or N
  MISC_FEATURE (39)..(39): X is K or S
  MISC_FEATURE (40)..(40): X is N, Q, or T
  MISC_FEATURE (41)..(41): X is S or D
XXXLXXLAXXVLXXVXXGXXPXXAVXXAIXXAXXXXXXXXX

SEQ ID NO: 190 - protein, 41 aa, Artificial Sequence
  Synthetic
SDLEKALKRFVKEEKKKGRNPEEAKKEAKKLKKKLKKSAGS

SEQ ID NO: 191 - protein, 41 aa, Artificial Sequence
  Synthetic
SDLLTALAKFVLEEVRKGRNPEEAVKEAIKLAEKLKRSAGS

SEQ ID NO: 192 - protein, 41 aa, Artificial Sequence
  Synthetic
SEQLEKLATKVLEEVKKGRNPKRAVEEAIKQAKEDRKRSNS

SEQ ID NO: 193 - protein, 41 aa, Artificial Sequence
  Synthetic
  MISC_FEATURE (1)..(1): X is S, T, or D
  MISC_FEATURE (2)..(2): X is S, A, or Q
  MISC_FEATURE (3)..(3): X is S, A, or T
  MISC_FEATURE (4)..(4): X is E, D, K or Q
  MISC_FEATURE (5)..(5): X is E, K or R
  MISC_FEATURE (8)..(8): X is Q, R, D, or K
  MISC_FEATURE (9)..(9): X is S, A, or E
  MISC_FEATURE (11)..(11): X is K, I, R or Y
  MISC_FEATURE (12)..(12): X is K, R or E
  MISC_FEATURE (15)..(15): X is K or Q
  MISC_FEATURE (16)..(16): X is K, R, E or Q
  MISC_FEATURE (19)..(19): X is K, Y, G, or R
  MISC_FEATURE (20)..(20): X is D, S, or N
  MISC_FEATURE (21)..(21): X is P or S
  MISC_FEATURE (22)..(22): X is D or E
  MISC_FEATURE (23)..(23): X is Q or E
  MISC_FEATURE (25)..(25): X is Q, D, K  or E
  MISC_FEATURE (26)..(26): X is K or R
  MISC_FEATURE (27)..(27): X is K, V or Q
  MISC_FEATURE (29)..(29): X is R, E, D or Q
  MISC_FEATURE (30)..(30): X is E or Q
  MISC_FEATURE (32)..(32): X is K, A or Q
  MISC_FEATURE (33)..(33): X is K, E or T
  MISC_FEATURE (34)..(34): X is Q, N, A, or D
  MISC_FEATURE (36)..(36): X is E or T
  MISC_FEATURE (37)..(37): X is E or K
  MISC_FEATURE (38)..(38): X is E, T or Q
  MISC_FEATURE (40)..(40): X is N or T
  MISC_FEATURE (41)..(41): X is S or T
XXXXXAAXXVXXYLXXQGXXXXXAXXXAXXVXXXIXXXAXX

SEQ ID NO: 194 - protein, 41 aa, Artificial Sequence
  Synthetic
  MISC_FEATURE (1)..(1): X is S, D, or E
  MISC_FEATURE (2)..(2): X is S, A, or E
  MISC_FEATURE (3)..(3): X is V or A
  MISC_FEATURE (5)..(5): X is R, E, K, or S
  MISC_FEATURE (9)..(9): X is A or E
  MISC_FEATURE (12)..(12): X is F, K, I or E
  MISC_FEATURE (16)..(16): X is R, N, Q or E
  MISC_FEATURE (19)..(19): X is Y or Q
  MISC_FEATURE (20)..(20): X is D or S
  MISC_FEATURE (21)..(21): X is P or A
  MISC_FEATURE (22)..(22): X is D or E
  MISC_FEATURE (23)..(23): X is Q, K, R or E
  MISC_FEATURE (26)..(26): X is K, R or E
  MISC_FEATURE (27)..(27): X is K, V, Q or E
  MISC_FEATURE (29)..(29): X is Q, R or I
  MISC_FEATURE (30)..(30): X is E, R or K
  MISC_FEATURE (33)..(33): X is N, Q, R or K
  MISC_FEATURE (34)..(34): X is A, Q, N or D
  MISC_FEATURE (37)..(37): X is K, E, N or D
  MISC_FEATURE (38)..(38): X is E, Q or T
  MISC_FEATURE (41)..(41): X is S or T
XXXIXAAAXVVXYLLXQGXXXXXALXXAXXVAXXIEXXANX

SEQ ID NO: 195 - protein, 41 aa, Artificial Sequence
  Synthetic
  MISC_FEATURE (1)..(1): X is D or E
  MISC_FEATURE (2)..(2): X is D, S, Q or E
  MISC_FEATURE (3)..(3): X is V or A
  MISC_FEATURE (5)..(5): X is K, R, or E
  MISC_FEATURE (6)..(6): X is T, A, R, or E
  MISC_FEATURE (9)..(9): X is K, S, R, or E
  MISC_FEATURE (12)..(12): X is Y, I, K, or E
  MISC_FEATURE (13)..(13): X is K or E
  MISC_FEATURE (14)..(14): X is R, L or E
  MISC_FEATURE (16)..(16): X is R, K, Q or E
  MISC_FEATURE (17)..(17): X is R, K, or E
  MISC_FEATURE (19)..(19): X is Q, Y, R, or K
  MISC_FEATURE (20)..(20): X is D or S
  MISC_FEATURE (21)..(21): X is P or A
  MISC_FEATURE (22)..(22): X is D or E
  MISC_FEATURE (23)..(23): X is K, Q, D or E
  MISC_FEATURE (26)..(26): X is K, Q, or E
  MISC_FEATURE (27)..(27): X is K, Q, R or E
  MISC_FEATURE (29)..(29): X is Q, I or R
  MISC_FEATURE (30)..(30): X is K, E or R
  MISC_FEATURE (31)..(31): X is H, Q, E or R
  MISC_FEATURE (33)..(33): X is K, Q, E or R
  MISC_FEATURE (34)..(34): X is K, N, E or R
  MISC_FEATURE (35)..(35): X is K, T, E or I
  MISC_FEATURE (37)..(37): X is K, R, E or N
  MISC_FEATURE (38)..(38): X is K, T, E or Q
  MISC_FEATURE (39)..(39): X is K, T, E or R
  MISC_FEATURE (41)..(41): X is S, D, or T
XXXIXXAAXVVXXXLXXGXXXXXALXXAXXXAXXXEXXXTX

SEQ ID NO: 196 - protein, 41 aa, Artificial Sequence
  Synthetic
SSTERAAQSVKKYLQQQGKDPDQAQKKAQEVKENIEKEANS

SEQ ID NO: 197 - protein, 41 aa, Artificial Sequence
  Synthetic
SSVIRAAAAVVFYLLEQGYDPDQALKKAQEVARNIENEANS

SEQ ID NO: 198 - protein, 41 aa, Artificial Sequence
  Synthetic
DDVIKEAAKVVYKRLEEGQDPDKALEEARKRAQKTEKKTTS

SEQ ID NO: 199 - protein, 42 aa, Artificial Sequence
  Synthetic
  MISC_FEATURE (1)..(1): X is S, N, or D
  MISC_FEATURE (2)..(2): X is K, E, N, or D
  MISC_FEATURE (3)..(3): X is L, E, T, or D
  MISC_FEATURE (4)..(4): X is Q, K, or D
  MISC_FEATURE (5)..(5): X is E, N, K, or R
  MISC_FEATURE (6)..(6): X is V or I
  MISC_FEATURE (8)..(8): X is D, K or E
  MISC_FEATURE (9)..(9): X is R, N, K or E
  MISC_FEATURE (11)..(11): X is V, I or R
  MISC_FEATURE (12)..(12): X is K, E or R
  MISC_FEATURE (13)..(13): X is Q, A, or D
  MISC_FEATURE (14)..(14): X is L or A
  MISC_FEATURE (15)..(15): X is K, E, Q, or R
  MISC_FEATURE (16)..(16): X is K, N or R
  MISC_FEATURE (17)..(17): X is D, K, N or E
  MISC_FEATURE (19)..(19): X is R, Q, H, or K
  MISC_FEATURE (20)..(20): X is S, D, or N
  MISC_FEATURE (21)..(21): X is P, E, or R
  MISC_FEATURE (22)..(22): X is D, E, or N
  MISC_FEATURE (23)..(23): X is E or S
  MISC_FEATURE (25)..(25): X is E, R or K
  MISC_FEATURE (26)..(26): X is E, R or K
  MISC_FEATURE (27)..(27): X is E, T, D or K
  MISC_FEATURE (29)..(29): X is E, R, D or K
  MISC_FEATURE (30)..(30): X is E, R, or K
  MISC_FEATURE (32)..(32): X is I or V
  MISC_FEATURE (33)..(33): X is E, R, K or N
  MISC_FEATURE (34)..(34): X is E, R, K or Q
  MISC_FEATURE (36)..(36): X is R, K or Q
  MISC_FEATURE (37)..(37): X is D, E, K or Q
  MISC_FEATURE (38)..(38): X is A or S
  MISC_FEATURE (42)..(42): X is D, N, or T
XXXXXXAXXIXXXXXXXGXXXXXAXXXAXXLXXXIXXXAGGX

SEQ ID NO: 200 - protein, 42 aa, Artificial Sequence
  Synthetic
  MISC_FEATURE (1)..(1): X is S, E, D or Q
  MISC_FEATURE (2)..(2): X is N, E, D or Q
  MISC_FEATURE (4)..(4): X is L or I
  MISC_FEATURE (5)..(5): X is E, R, D, or Q
  MISC_FEATURE (6)..(6): X is V or I
  MISC_FEATURE (8)..(8): X is V, A or I
  MISC_FEATURE (9)..(9): X is R, Q, E, or W
  MISC_FEATURE (11)..(11): X is V or I
  MISC_FEATURE (12)..(12): X is K, E, or Q
  MISC_FEATURE (13)..(13): X is A, D, E, or Q
  MISC_FEATURE (14)..(14): X is L or A
  MISC_FEATURE (15)..(15): X is E, Q, T, or I
  MISC_FEATURE (16)..(16): X is E, Q, K, or N
  MISC_FEATURE (17)..(17): X is E, Q, K, or D
  MISC_FEATURE (19)..(19): X is R, Q or Y
  MISC_FEATURE (20)..(20): X is S, D, or N
  MISC_FEATURE (21)..(21): X is P or A
  MISC_FEATURE (22)..(22): X is S, R or A
  MISC_FEATURE (23)..(23): X is R or E
  MISC_FEATURE (26)..(26): X is K, R or E
  MISC_FEATURE (27)..(27): X is K, T or E
  MISC_FEATURE (29)..(29): X is V or A
  MISC_FEATURE (30)..(30): X is R or E
  MISC_FEATURE (32)..(32): X is I or V
  MISC_FEATURE (33)..(33): X is E, Q, K, or R
  MISC_FEATURE (34)..(34): X is K or R
  MISC_FEATURE (36)..(36): X is V or R
  MISC_FEATURE (37)..(37): X is D, E, Q or R
  MISC_FEATURE (42)..(42): X is D or N
XXLXXXAXXIXXXXXXXGXXXXXAAXXAXXLXXXIXXAAGGX

SEQ ID NO: 201 - protein, 42 aa, Artificial Sequence
  Synthetic
  MISC_FEATURE (1)..(1): X is S, D, or P
  MISC_FEATURE (2)..(2): X is K, D, or E
  MISC_FEATURE (3)..(3): X is R or L
  MISC_FEATURE (5)..(5): X is K, Q, R or E
  MISC_FEATURE (6)..(6): X is K, R or E
  MISC_FEATURE (8)..(8): X is V, A, or I
  MISC_FEATURE (9)..(9): X is E or K
  MISC_FEATURE (10)..(10): X is L, I, E or T
  MISC_FEATURE (11)..(11): X is V or I
  MISC_FEATURE (12)..(12): X is R, K, D, or E
  MISC_FEATURE (13)..(13): X is K, Q or E
  MISC_FEATURE (14)..(14): X is L, A or E
  MISC_FEATURE (15)..(15): X is Q, N, A or E
  MISC_FEATURE (16)..(16): X is K, R, N or E
  MISC_FEATURE (17)..(17): X is K, R, D or E
  MISC_FEATURE (19)..(19): X is K, R, Q or N
  MISC_FEATURE (20)..(20): X is S, D or N
  MISC_FEATURE (21)..(21): X is P or A
  MISC_FEATURE (22)..(22): X is S, R or A
  MISC_FEATURE (23)..(23): X is E, K, D, or N
  MISC_FEATURE (26)..(26): X is E, K, or R
  MISC_FEATURE (27)..(27): X is Q, E, K, or R
  MISC_FEATURE (29)..(29): X is V or A
  MISC_FEATURE (30)..(30): X is E, R or Q
  MISC_FEATURE (31)..(31): X is K, E, R or D
  MISC_FEATURE (32)..(32): X is I or V
  MISC_FEATURE (33)..(33): X is Q, E, K or A
  MISC_FEATURE (34)..(34): X is R, E, K or N
  MISC_FEATURE (35)..(35): X is R, E, S or D
  MISC_FEATURE (37)..(37): X is R, E, K or D
  MISC_FEATURE (38)..(38): X is R, E, K or N
  MISC_FEATURE (39)..(39): X is D, Q or N
XXXIXXAXXXXXXXXXXGXXXXXAAXXAXXXXXXXVXXXGGN

SEQ ID NO: 202 - protein, 42 aa, Artificial Sequence
  Synthetic
SDLQEVADRIVEQLKREGRSPEEARKEARRLIEEIKQSAGGD

SEQ ID NO: 203 - protein, 42 aa, Artificial Sequence
  Synthetic
SELIEVAVRIVKELEEQGRSPSEAAKEAVELIERIRRAAGGD

SEQ ID NO: 204 - protein, 42 aa, Artificial Sequence
  Synthetic
SDRIKKAVELVRELEERGRSPSEAARRAVEEIQRSVEEDGGN

SEQ ID NO: 205 - protein, 43 aa, Artificial Sequence
  Synthetic
  MISC_FEATURE (1)..(1): X is S, T, or D
  MISC_FEATURE (2)..(2): X is E, D, K or Q
  MISC_FEATURE (3)..(3): X is S or A
  MISC_FEATURE (4)..(4): X is D, E, or K
  MISC_FEATURE (5)..(5): X is E or K
  MISC_FEATURE (6)..(6): X is V or A
  MISC_FEATURE (8)..(8): X is K, Q or E
  MISC_FEATURE (9)..(9): X is K, R or N
  MISC_FEATURE (11)..(11): X is S, E, A, or K
  MISC_FEATURE (12)..(12): X is R, E, or K
  MISC_FEATURE (13)..(13): X is L, E, or Q
  MISC_FEATURE (16)..(16): X is K or R
  MISC_FEATURE (17)..(17): X is E, D, K or Q
  MISC_FEATURE (19)..(19): X is E, R, K or A
  MISC_FEATURE (20)..(20): X is S or D
  MISC_FEATURE (21)..(21): X is E or P
  MISC_FEATURE (22)..(22): X is E, D or K
  MISC_FEATURE (23)..(23): X is E, Q or R
  MISC_FEATURE (25)..(25): X is K, Q or N
  MISC_FEATURE (26)..(26): X is K or E
  MISC_FEATURE (28)..(28): X is V or A
  MISC_FEATURE (29)..(29): X is E, K or R
  MISC_FEATURE (30)..(30): X is D or R
  MISC_FEATURE (31)..(31): X is F or Y
  MISC_FEATURE (32)..(32): X is R, K, E or Q
  MISC_FEATURE (33)..(33): X is D, K, E or Q
  MISC_FEATURE (35)..(35): X is I or L
  MISC_FEATURE (36)..(36): X is E, K, D or Q
  MISC_FEATURE (37)..(37): X is E, K or R
  MISC_FEATURE (39)..(39): X is Q, E, K or R
  MISC_FEATURE (40)..(40): X is D, E, K or R
  MISC_FEATURE (41)..(41): X is D, E, N or Q
  MISC_FEATURE (43)..(43): X is D or N
XXXXXXAXXIXXXAKXXGXXXXXVXXLXXXXXXAXXXLXXXGX

SEQ ID NO: 206 - protein, 43 aa, Artificial Sequence
  Synthetic
  MISC_FEATURE (1)..(1): X is S, E, D or K
  MISC_FEATURE (2)..(2): X is R, E, D or K
  MISC_FEATURE (4)..(4): X is I, E, V or K
  MISC_FEATURE (5)..(5): X is R, E, Q or K
  MISC_FEATURE (6)..(6): X is V or A
  MISC_FEATURE (9)..(9): X is R, K, Q or E
  MISC_FEATURE (12)..(12): X is D or E
  MISC_FEATURE (13)..(13): X is Q, L or E
  MISC_FEATURE (15)..(15): X is Q or L
  MISC_FEATURE (16)..(16): X is R or K
  MISC_FEATURE (17)..(17): X is E, D or K
  MISC_FEATURE (19)..(19): X is L, R, A or K
  MISC_FEATURE (20)..(20): X is S or D
  MISC_FEATURE (21)..(21): X is P or A
  MISC_FEATURE (22)..(22): X is E, Q, or K
  MISC_FEATURE (23)..(23): X is E, Q, R or T
  MISC_FEATURE (25)..(25): X is V or A
  MISC_FEATURE (26)..(26): X is E or R
  MISC_FEATURE (29)..(29): X is E, I, K or R
  MISC_FEATURE (30)..(30): X is E or R
  MISC_FEATURE (31)..(31): X is F or Y
  MISC_FEATURE (32)..(32): X is V or A
  MISC_FEATURE (33)..(33): X is Q, K, R, or D
  MISC_FEATURE (35)..(35): X is I or L
  MISC_FEATURE (36)..(36): X is Q, E, N, or K
  MISC_FEATURE (37)..(37): X is Q, D or K
  MISC_FEATURE (39)..(39): X is Q, R or E
  MISC_FEATURE (40)..(40): X is Q, R, K or E
  MISC_FEATURE (41)..(41): X is Q, N or E
  MISC_FEATURE (43)..(43): X is D, N or E
XXAXXXAVXIAXXAXXXGXXXXXVXXLVXXXXXAXXXLXXXGX

SEQ ID NO: 207 - protein, 43 aa, Artificial Sequence
  Synthetic
  MISC_FEATURE (1)..(1): X is E, D, K or S
  MISC_FEATURE (2)..(2): X is E or D
  MISC_FEATURE (3)..(3): X is E, S, A or R
  MISC_FEATURE (4)..(4): X is E, I, K or V
  MISC_FEATURE (5)..(5): X is E, K or Q
  MISC_FEATURE (6)..(6): X is R, K or Q
  MISC_FEATURE (9)..(9): X is R, K, E or Q
  MISC_FEATURE (10)..(10): X is T, I, E, or D
  MISC_FEATURE (12)..(12): X is I, E, or Q
  MISC_FEATURE (13)..(13): X is K, N, E, or Q
  MISC_FEATURE (14)..(14): X is A or Q
  MISC_FEATURE (15)..(15): X is L or Q
  MISC_FEATURE (16)..(16): X is E, R, D, or K
  MISC_FEATURE (17)..(17): X is E, T, D, or K
  MISC_FEATURE (19)..(19): X is E, R, A, or K
  MISC_FEATURE (20)..(20): X is S, D, or N
  MISC_FEATURE (21)..(21): X is P or A
  MISC_FEATURE (22)..(22): X is K, E, or R
  MISC_FEATURE (23)..(23): X is K, E, Q or S
  MISC_FEATURE (25)..(25): X is V or A
  MISC_FEATURE (26)..(26): X is E, R, or K
  MISC_FEATURE (27)..(27): X is T, D, R, or N
  MISC_FEATURE (29)..(29): X is E, Q, or I
  MISC_FEATURE (30)..(30): X is E, R, or K
  MISC_FEATURE (31)..(31): X is E, Q, H or S
  MISC_FEATURE (32)..(32): X is V or A
  MISC_FEATURE (33)..(33): X is K, E, or T
  MISC_FEATURE (34)..(34): X is K, E, N or R
  MISC_FEATURE (35)..(35): X is V, E, N or I
  MISC_FEATURE (36)..(36): X is D, E, K or Q
  MISC_FEATURE (37)..(37): X is E, K or R
  MISC_FEATURE (38)..(38): X is E, K or L
  MISC_FEATURE (39)..(39): X is Q, E, K or D
  MISC_FEATURE (40)..(40): X is Q, R, K or D
  MISC_FEATURE (41)..(41): X is Q, R, K or E
  MISC_FEATURE (43)..(43): X is Q, N, K or E
XXXXXXAVXXAXXXXXXGXXXXXVXXXVXXXXXXXXXXXXXGX

SEQ ID NO: 208 - protein, 43 aa, Artificial Sequence
  Synthetic
SESDEVAKRISKEAKKEGRSEEEVKELVERFREAIEKLKEQGD

SEQ ID NO: 209 - protein, 43 aa, Artificial Sequence
  Synthetic
SEAIRVAVEIADEALREGLSPEEVVELVERFVQAIQKLQENGE

SEQ ID NO: 210 - protein, 43 aa, Artificial Sequence
  Synthetic
EDEIQKAVETAQEQLEEGRSPKEVVETVEEQVKEVEEKQQKGE

SEQ ID NO: 211 - protein, 57 aa, Artificial Sequence
  Synthetic
  MISC_FEATURE (1)..(1): X is S, D, or T
  MISC_FEATURE (2)..(2): X is N, L, D, or R
  MISC_FEATURE (3)..(3): X is I, A, E or R
  MISC_FEATURE (4)..(4): X is K, D, E or R
  MISC_FEATURE (5)..(5): X is K, E or R
  MISC_FEATURE (7)..(7): X is K, E or R
  MISC_FEATURE (8)..(8): X is K, E or R
  MISC_FEATURE (9)..(9): X is I or V
  MISC_FEATURE (11)..(11): X is D, E, K, or Q
  MISC_FEATURE (12)..(12): X is E, K, or R
  MISC_FEATURE (14)..(14): X is I, V, or E
  MISC_FEATURE (15)..(15): X is D, K, R or E
  MISC_FEATURE (16)..(16): X is V, A, or I
  MISC_FEATURE (17)..(17): X is V or A
  MISC_FEATURE (18)..(18): X is R, Q, D, or E
  MISC_FEATURE (19)..(19): X is R, K or E
  MISC_FEATURE (22)..(22): X is R, K, D or E
  MISC_FEATURE (23)..(23): X is R, K, or N
  MISC_FEATURE (24)..(24): X is R, K, Q or E
  MISC_FEATURE (27)..(27): X is S or D
  MISC_FEATURE (28)..(28): X is P, S or E
  MISC_FEATURE (29)..(29): X is D, N, Q or E
  MISC_FEATURE (30)..(30): X is R, K or E
  MISC_FEATURE (32)..(32): X is R, K, D or Q
  MISC_FEATURE (33)..(33): X is R, K, E or Q
  MISC_FEATURE (35)..(35): X is R, I, E or L
  MISC_FEATURE (36)..(36): X is R, Q, E or K
  MISC_FEATURE (37)..(37): X is R, Q, E or D
  MISC_FEATURE (39)..(39): X is R, E or K
  MISC_FEATURE (40)..(40): X is R, E or K
  MISC_FEATURE (41)..(41): X is C, A, or V
  MISC_FEATURE (43)..(43): X is K, E or R
  MISC_FEATURE (44)..(44): X is K, L or R
  MISC_FEATURE (45)..(45): X is A, L or I
  MISC_FEATURE (46)..(46): X is K, R, L or I
  MISC_FEATURE (47)..(47): X is K, R, or E
  MISC_FEATURE (48)..(48): X is L, A, I or V
  MISC_FEATURE (49)..(49): X is A or V
  MISC_FEATURE (50)..(50): X is K, E or Q
  MISC_FEATURE (51)..(51): X is K, E R, or Q
  MISC_FEATURE (52)..(52): X is K, E, R, or Q
  MISC_FEATURE (53)..(53): X is K, E, D, or Q
  MISC_FEATURE (54)..(54): X is K, E, D, or R
  MISC_FEATURE (55)..(55): X is S, L, A or K
  MISC_FEATURE (56)..(56): X is N, P or S
  MISC_FEATURE (57)..(57): X is N or S
XXXXXAXXXAXXAXXXXXXAAXXXGGXXXXIXXAXXXAXXXAXXXXXXXXXAXXXXX

SEQ ID NO: 212 - protein, 57 aa, Artificial Sequence
  Synthetic
  MISC_FEATURE (1)..(1): X is S, D, E or Q
  MISC_FEATURE (2)..(2): X is D, N or A
  MISC_FEATURE (3)..(3): X is V or A
  MISC_FEATURE (4)..(4): X is R, Q, or K
  MISC_FEATURE (5)..(5): X is R, Q, E or K
  MISC_FEATURE (8)..(8): X is R, Q, E or K
  MISC_FEATURE (9)..(9): X is V or I
  MISC_FEATURE (11)..(11): X is L or I
  MISC_FEATURE (12)..(12): X is E, R, D, or Q
  MISC_FEATURE (15)..(15): X is E, R, or K
  MISC_FEATURE (16)..(16): X is V, A, or I
  MISC_FEATURE (17)..(17): X is V or A
  MISC_FEATURE (19)..(19): X is R, E, or K
  MISC_FEATURE (22)..(22): X is E or Q
  MISC_FEATURE (23)..(23): X is E, K or R
  MISC_FEATURE (24)..(24): X is E, K, T or R
  MISC_FEATURE (27)..(27): X is S, D, or N
  MISC_FEATURE (28)..(28): X is P or A
  MISC_FEATURE (29)..(29): X is E, D, K or R
  MISC_FEATURE (30)..(30): X is E, D, Q or R
  MISC_FEATURE (31)..(31): X is V or I
  MISC_FEATURE (32)..(32): X is V or A
  MISC_FEATURE (33)..(33): X is E or R
  MISC_FEATURE (35)..(35): X is V or I
  MISC_FEATURE (36)..(36): X is C, A, E or I
  MISC_FEATURE (37)..(37): X is R or E
  MISC_FEATURE (39)..(39): X is V or A
  MISC_FEATURE (40)..(40): X is R, E, or K
  MISC_FEATURE (41)..(41): X is C, A,  or V
  MISC_FEATURE (43)..(43): X is E, R, or K
  MISC_FEATURE (44)..(44): X is E, R, L or K
  MISC_FEATURE (45)..(45): X is A, L or I
  MISC_FEATURE (46)..(46): X is V, L or I
  MISC_FEATURE (47)..(47): X is R, E, K or D
  MISC_FEATURE (48)..(48): X is L, A, I or V
  MISC_FEATURE (49)..(49): X is A or V
  MISC_FEATURE (50)..(50): X is K, E, A or Q
  MISC_FEATURE (51)..(51): X is K, E, R or D
  MISC_FEATURE (53)..(53): X is E or Q
  MISC_FEATURE (54)..(54): X is E, R, D or K
  MISC_FEATURE (55)..(55): X is S or D
  MISC_FEATURE (56)..(56): X is N,P, S or Q
  MISC_FEATURE (57)..(57): X is N or S
XXXXXAAXXAXXAVXXXVXAAXXXGGXXXXXXXAXXXAXXXAXXXXXXXXXAXXXXX

SEQ ID NO: 213 - protein, 57 aa, Artificial Sequence
  Synthetic
  MISC_FEATURE (1)..(1): X is E, D, Q, or T
  MISC_FEATURE (2)..(2): X is N, R, D or E
  MISC_FEATURE (3)..(3): X is V or A
  MISC_FEATURE (5)..(5): X is E, K or R
  MISC_FEATURE (6)..(6): X is A, S or R
  MISC_FEATURE (8)..(8): X is Q, K, E or R
  MISC_FEATURE (9)..(9): X is K, E or R
  MISC_FEATURE (11)..(11): X is L or I
  MISC_FEATURE (12)..(12): X is E or K
  MISC_FEATURE (13)..(13): X is D, H, E or K
  MISC_FEATURE (15)..(15): X is I, E or R
  MISC_FEATURE (16)..(16): X is K, E or R
  MISC_FEATURE (17)..(17): X is T or V
  MISC_FEATURE (19)..(19): X is Q, R, E, or K
  MISC_FEATURE (20)..(20): X is Q, N, E, or K
  MISC_FEATURE (22)..(22): X is Q, S, E, or K
  MISC_FEATURE (23)..(23): X is R, E, or K
  MISC_FEATURE (24)..(24): X is D, R, E, or K
  MISC_FEATURE (26)..(26): X is G or K
  MISC_FEATURE (27)..(27): X is S or D
  MISC_FEATURE (28)..(28): X is P or A
  MISC_FEATURE (29)..(29): X is E, D, K or R
  MISC_FEATURE (30)..(30): X is E, D or K
  MISC_FEATURE (31)..(31): X is V or I
  MISC_FEATURE (32)..(32): X is V or A
  MISC_FEATURE (33)..(33): X is E or R
  MISC_FEATURE (34)..(34): X is Q, N, D or R
  MISC_FEATURE (35)..(35): X is V or I
  MISC_FEATURE (36)..(36): X is C, E, K or Q
  MISC_FEATURE (37)..(37): X is E, K or R
  MISC_FEATURE (38)..(38): X is S or A
  MISC_FEATURE (39)..(39): X is V or A
  MISC_FEATURE (40)..(40): X is R, E, or K
  MISC_FEATURE (41)..(41): X is R, Q or K
  MISC_FEATURE (43)..(43): X is E, A, Q or K
  MISC_FEATURE (44)..(44): X is E, R, Q or K
  MISC_FEATURE (45)..(45): X is E, R, Q or D
  MISC_FEATURE (46)..(46): X is I, V or L
  MISC_FEATURE (47)..(47): X is R, K, E, or Q
  MISC_FEATURE (48)..(48): X is T, D, E, or K
  MISC_FEATURE (49)..(49): X is T, Q, V or A
  MISC_FEATURE (50)..(50): X is Q, E, A, or K
  MISC_FEATURE (51)..(51): X is T, E, N, or K
  MISC_FEATURE (52)..(52): X is E, R, or K
  MISC_FEATURE (53)..(53): X is E or Q
  MISC_FEATURE (54)..(54): X is R, K, E or D
  MISC_FEATURE (55)..(55): X is R, K, or S
  MISC_FEATURE (56)..(56): X is T, N, P or S
  MISC_FEATURE (57)..(57): X is N, D or S
XXXRXXAXXAXXXVXXXVXXAXXXGXXXXXXXXXXXXXXXXAXXXXXXXXXXXXXXX

SEQ ID NO: 214 - protein, 57 aa, Artificial Sequence
  Synthetic
SDIEKAKRIADRAIDVVRKAAEKEGGSPEKIREALQQAKRCAEKLIRLVKEAQESNS

SEQ ID NO: 215 - protein, 57 aa, Artificial Sequence
  Synthetic
SDVREAARVALEAVRVVVRAAEEKGGSPEEVVEAVCRAVRCAEKLIRLVKRAEESNS

SEQ ID NO: 216 - protein, 57 aa, Artificial Sequence
  Synthetic
ENVRESARRALEKVLKTVQQAEEEGKSPEEVVEQVCRSVRKAEEQIRETQERERSTS

SEQ ID NO: 217 - protein, 57 aa, Artificial Sequence
  Synthetic
  MISC_FEATURE (1)..(1): X is S, D or T
  MISC_FEATURE (2)..(2): X is I, Q, D or T
  MISC_FEATURE (3)..(3): X is A or S
  MISC_FEATURE (4)..(4): X is E, K or Q
  MISC_FEATURE (5)..(5): X is E, K, R or Q
  MISC_FEATURE (6)..(6): X is V or I
  MISC_FEATURE (7)..(7): X is K, E, R or Q
  MISC_FEATURE (8)..(8): X is K, E, or D
  MISC_FEATURE (9)..(9): X is K, E, Q or D
  MISC_FEATURE (11)..(11): X is K, E, or R
  MISC_FEATURE (12)..(12): X is K or E
  MISC_FEATURE (13)..(13): X is I, L or T
  MISC_FEATURE (15)..(15): X is N, E, K or Q
  MISC_FEATURE (16)..(16): X is R, E, K or Q
  MISC_FEATURE (18)..(18): X is R, E, K or Y
  MISC_FEATURE (19)..(19): X is R, E, K or D
  MISC_FEATURE (20)..(20): X is T, E, Q or R
  MISC_FEATURE (22)..(22): X is K, E, Q or R
  MISC_FEATURE (23)..(23): X is K, E, Q or R
  MISC_FEATURE (24)..(24): X is E, Q or D
  MISC_FEATURE (26)..(26): X is E, Q, H or K
  MISC_FEATURE (27)..(27): X is S or D
  MISC_FEATURE (28)..(28): X is E, P, S or D
  MISC_FEATURE (29)..(29): X is K, S or D
  MISC_FEATURE (30)..(30): X is R, E or Q
  MISC_FEATURE (32)..(32): X is D, K, E or Q
  MISC_FEATURE (33)..(33): X is K or Q
  MISC_FEATURE (35)..(35): X is E, Y, F, or R
  MISC_FEATURE (36)..(36): X is E, K, D, or R
  MISC_FEATURE (37)..(37): X is L, T, D, or E
  MISC_FEATURE (39)..(39): X is R, E, K or L
  MISC_FEATURE (40)..(40): X is R, E, or K
  MISC_FEATURE (43)..(43): X is R, E, D or K
  MISC_FEATURE (44)..(44): X is R, E, Q or K
  MISC_FEATURE (47)..(47): X is R, E, Q or K
  MISC_FEATURE (49)..(49): X is I or A
  MISC_FEATURE (50)..(50): X is E, R, or K
  MISC_FEATURE (51)..(51): X is E, R, or K
  MISC_FEATURE (53)..(53): X is Q, E, R, or K
  MISC_FEATURE (54)..(54): X is D, E, R, or K
  MISC_FEATURE (55)..(55): X is E, Q, or N
  MISC_FEATURE (57)..(57): X is N, S, or D
XXXXXXXXXAXXXAXXAXXXAXXXGXXXXXAXXAXXXVXXAAXXLAXLXXXAXXXGX

SEQ ID NO: 218 - protein, 57 aa, Artificial Sequence
  Synthetic
  MISC_FEATURE (1)..(1): X is S, D, E, or Q
  MISC_FEATURE (2)..(2): X is T, D, E, or I
  MISC_FEATURE (4)..(4): X is L, A, E or K
  MISC_FEATURE (5)..(5): X is R, Q, E or K
  MISC_FEATURE (6)..(6): X is V or I
  MISC_FEATURE (8)..(8): X is R or E
  MISC_FEATURE (9)..(9): X is Q, I or E
  MISC_FEATURE (11)..(11): X is L or A
  MISC_FEATURE (12)..(12): X is E or K
  MISC_FEATURE (13)..(13): X is I, L or T
  MISC_FEATURE (15)..(15): X is R, K, E, or I
  MISC_FEATURE (16)..(16): X is R, K, E, or D
  MISC_FEATURE (19)..(19): X is R, K, or E
  MISC_FEATURE (20)..(20): X is T, Q, or E
  MISC_FEATURE (22)..(22): X is T, N, R, or K
  MISC_FEATURE (23)..(23): X is R or K
  MISC_FEATURE (24)..(24): X is Q, D, E or R
  MISC_FEATURE (26)..(26): X is Q, L, E or H
  MISC_FEATURE (29)..(29): X is Q, R or T
  MISC_FEATURE (30)..(30): X is Q, R or E
  MISC_FEATURE (33)..(33): X is K or E
  MISC_FEATURE (35)..(35): X is F or Y
  MISC_FEATURE (36)..(36): X is V, A, or E
  MISC_FEATURE (36)..(36): X is V, Q, A, or E
  MISC_FEATURE (37)..(37): X is D, T, A or L
  MISC_FEATURE (40)..(40): X is E, R, D or K
  MISC_FEATURE (43)..(43): X is I or K
  MISC_FEATURE (44)..(44): X is S, K, E or Q
  MISC_FEATURE (47)..(47): X is R, T, E or Q
  MISC_FEATURE (49)..(49): X is I or A
  MISC_FEATURE (50)..(50): X is I, E or L
  MISC_FEATURE (51)..(51): X is K, S, E or Q
  MISC_FEATURE (53)..(53): X is K, R, E or Q
  MISC_FEATURE (54)..(54): X is K, R, or Q
  MISC_FEATURE (55)..(55): X is D, E, or Q
  MISC_FEATURE (57)..(57): X is D, N, or S
XXAXXXAXXAXXXAXXAFXXAXXXGXSAXXAAXAXXXVVXAAXXLAXLXXXAXXXGX

SEQ ID NO: 219 - protein, 57 aa, Artificial Sequence
  Synthetic
  MISC_FEATURE (1)..(1): X is Q, D, E, or R
  MISC_FEATURE (2)..(2): X is K, D, E, or T
  MISC_FEATURE (4)..(4): X is K, E, or L
  MISC_FEATURE (5)..(5): X is K, E, Q or R
  MISC_FEATURE (6)..(6): X is I or V
  MISC_FEATURE (8)..(8): X is R, E, or S
  MISC_FEATURE (9)..(9): X is K, E, or Q
  MISC_FEATURE (11)..(11): X is L or A
  MISC_FEATURE (12)..(12): X is Q, E, R, or K
  MISC_FEATURE (13)..(13): X is D, R, or K
  MISC_FEATURE (15)..(15): X is E, L, R or K
  MISC_FEATURE (16)..(16): X is E, R or K
  MISC_FEATURE (17)..(17): X is E, N or A
  MISC_FEATURE (19)..(19): X is E, K, Q, or R
  MISC_FEATURE (20)..(20): X is E, K, Q, or N
  MISC_FEATURE (22)..(22): X is E, R, Q, or N
  MISC_FEATURE (23)..(23): X is R, K, or N
  MISC_FEATURE (24)..(24): X is R, K, D or Q
  MISC_FEATURE (26)..(26): X is R, K, L or E
  MISC_FEATURE (27)..(27): X is S or D
  MISC_FEATURE (29)..(29): X is T, E, Q, or R
  MISC_FEATURE (30)..(30): X is E, Q, or R
  MISC_FEATURE (33)..(33): X is E, K, or Q
  MISC_FEATURE (34)..(34): X is E, R, or A
  MISC_FEATURE (35)..(35): X is F or Y
  MISC_FEATURE (36)..(36): X is V, A, E, or K
  MISC_FEATURE (37)..(37): X is D, E, or R
  MISC_FEATURE (38)..(38): X is T, V or R
  MISC_FEATURE (40)..(40): X is E, K, D or R
  MISC_FEATURE (41)..(41): X is E or K
  MISC_FEATURE (42)..(42): X is E or A
  MISC_FEATURE (43)..(43): X is I, R, E or K
  MISC_FEATURE (44)..(44): X is E or K
  MISC_FEATURE (45)..(45): X is E or K
  MISC_FEATURE (47)..(47): X is Q, R, E or K
  MISC_FEATURE (48)..(48): X is R, E or K
  MISC_FEATURE (49)..(49): X is Q, A, S or E
  MISC_FEATURE (50)..(50): X is I, R, L or N
  MISC_FEATURE (51)..(51): X is K, E, R, or N
  MISC_FEATURE (52)..(52): X is E, R, or L
  MISC_FEATURE (53)..(53): X is E, Q, K, or D
  MISC_FEATURE (54)..(54): X is E, Q, K, or R
  MISC_FEATURE (55)..(55): X is E, K, or R
  MISC_FEATURE (57)..(57): X is D, Q, K or T
XXAXXXAXXAXXXAXXXFXXAXXXGXXAXXAAXXXXXXVXXXXXXAXXXXXXXXXGX

SEQ ID NO: 220 - protein, 57 aa, Artificial Sequence
  Synthetic
SDAEEVKKQAEEIANRAYKTAQKQGESDSRAKKAEKLVRKAAEKLARLIERAQKEGD

SEQ ID NO: 221 - protein, 57 aa, Artificial Sequence
  Synthetic
SDALEVARQALEIARRAFETAKKQGHSATEAAKAFVDVVEAAISLAELIISAKRQGD

SEQ ID NO: 222 - protein, 57 aa, Artificial Sequence
  Synthetic
QKALEIARKALQKAKENFEEAQKRGESATQAAKRFVDTVEKEIKKAQEQIKRERKGD

SEQ ID NO: 223 - protein, 57 aa, Artificial Sequence
  Synthetic
  MISC_FEATURE (1)..(1): X is S, T, or D
  MISC_FEATURE (2)..(2): X is K, E, T, or D
  MISC_FEATURE (3)..(3): X is E or L
  MISC_FEATURE (4)..(4): X is E, K or D
  MISC_FEATURE (5)..(5): X is E, K, Q or N
  MISC_FEATURE (8)..(8): X is E, K, or R
  MISC_FEATURE (9)..(9): X is E, K, or R
  MISC_FEATURE (11)..(11): X is E or R
  MISC_FEATURE (12)..(12): X is K, Q, E or R
  MISC_FEATURE (13)..(13): X is V, A, or T
  MISC_FEATURE (15)..(15): X is K, E, or R
  MISC_FEATURE (16)..(16): X is N, K, E, or R
  MISC_FEATURE (17)..(17): X is A or L
  MISC_FEATURE (18)..(18): X is I or V
  MISC_FEATURE (19)..(19): X is K, E, D, or R
  MISC_FEATURE (20)..(20): X is K, E, Q, or T
  MISC_FEATURE (22)..(22): X is K, E, Q, or R
  MISC_FEATURE (23)..(23): X is K, E, D, or R
  MISC_FEATURE (24)..(24): X is Q, D, or K
  MISC_FEATURE (26)..(26): X is Q, L, or K
  MISC_FEATURE (27)..(27): X is D, N, or S
  MISC_FEATURE (28)..(28): X is P, E or S
  MISC_FEATURE (29)..(29): X is D, N, T or S
  MISC_FEATURE (30)..(30): X is E, K, R, or L
  MISC_FEATURE (32)..(32): X is E, K, R, or Q
  MISC_FEATURE (33)..(33): X is E, K, or R
  MISC_FEATURE (36)..(36): X is E, K, D or R
  MISC_FEATURE (37)..(37): X is E, K, or R
  MISC_FEATURE (40)..(40): X is E, K, N or R
  MISC_FEATURE (43)..(43): X is E or R
  MISC_FEATURE (44)..(44): X is K, Q, E or R
  MISC_FEATURE (46)..(46): X is V or A
  MISC_FEATURE (47)..(47): X is K or E
  MISC_FEATURE (48)..(48): X is K, T, V or E
  MISC_FEATURE (50)..(50): X is K, R or E
  MISC_FEATURE (51)..(51): X is K, R or E
  MISC_FEATURE (53)..(53): X is K, R or E
  MISC_FEATURE (54)..(54): X is D, K, R or E
  MISC_FEATURE (55)..(55): X is N, Q, R or E
XXXXXLIXXAXXXAXXXXXXAXXXGXXXXXAXXAAXXLIXAVXXAXXXAXXLXXXGN

SEQ ID NO: 224 - protein, 57 aa, Artificial Sequence
  Synthetic
  MISC_FEATURE (1)..(1): X is S, E, Q or T
  MISC_FEATURE (2)..(2): X is E, D or K
  MISC_FEATURE (5)..(5): X is E, R, D or K
  MISC_FEATURE (8)..(8): X is E, R, S or K
  MISC_FEATURE (9)..(9): X is E, R, or K
  MISC_FEATURE (12)..(12): X is Q, E, R, or K
  MISC_FEATURE (13)..(13): X is V, A, or T
  MISC_FEATURE (15)..(15): X is V, or I
  MISC_FEATURE (16)..(16): X is E, R, D or Q
  MISC_FEATURE (17)..(17): X is A or L
  MISC_FEATURE (19)..(19): X is E, D, K, or Q
  MISC_FEATURE (20)..(20): X is E, T, R, or Q
  MISC_FEATURE (22)..(22): X is V, Q, R, or A
  MISC_FEATURE (23)..(23): X is R, K or E
  MISC_FEATURE (24)..(24): X is Q, D or E
  MISC_FEATURE (26)..(26): X is Q, K or L
  MISC_FEATURE (27)..(27): X is D or N
  MISC_FEATURE (28)..(28): X is P or A
  MISC_FEATURE (29)..(29): X is F, W or A
  MISC_FEATURE (30)..(30): X is K, R, E or D
  MISC_FEATURE (33)..(33): X is K, R, or E
  MISC_FEATURE (37)..(37): X is K, R, or E
  MISC_FEATURE (40)..(40): X is K, R, or E
  MISC_FEATURE (43)..(43): X is V or A
  MISC_FEATURE (44)..(44): X is E, R, K or D
  MISC_FEATURE (46)..(46): X is A or V
  MISC_FEATURE (47)..(47): X is K, E, R or Q
  MISC_FEATURE (48)..(48): X is E, R or V
  MISC_FEATURE (50)..(50): X is E, R or H
  MISC_FEATURE (51)..(51): X is Q, R or K
  MISC_FEATURE (53)..(53): X is E, S or K
  MISC_FEATURE (54)..(54): X is E, R or K
  MISC_FEATURE (55)..(55): X is E, N, D or K
XXLAXLIXXAIXXAXXXVXXAXXXGXXXXXAAXAAAXLIXAVXXAXXXAXXLXXXGN

SEQ ID NO: 225 - protein, 57 aa, Artificial Sequence
  Synthetic
  MISC_FEATURE (1)..(1): X is S, K, T, or E
  MISC_FEATURE (2)..(2): X is D, K, or E
  MISC_FEATURE (5)..(5): X is D, R, K, or E
  MISC_FEATURE (6)..(6): X is R, K, or E
  MISC_FEATURE (8)..(8): X is N, R, K, or E
  MISC_FEATURE (9)..(9): X is D, Q, K, or E
  MISC_FEATURE (10)..(10): X is T, A, or S
  MISC_FEATURE (12)..(12): X is R, E,K or Q
  MISC_FEATURE (13)..(13): X is E, K or Q
  MISC_FEATURE (15)..(15): X is V, I or L
  MISC_FEATURE (16)..(16): X is R, E, K or Q
  MISC_FEATURE (17)..(17): X is D, E, K or N
  MISC_FEATURE (18)..(18): X is V or I
  MISC_FEATURE (19)..(19): X is Q or E
  MISC_FEATURE (20)..(20): X is Q, N, D or E
  MISC_FEATURE (22)..(22): X is V, Q, N, or A
  MISC_FEATURE (23)..(23): X is K, R, or E
  MISC_FEATURE (24)..(24): X is D, Q K, or E
  MISC_FEATURE (26)..(26): X is K or Q
  MISC_FEATURE (27)..(27): X is D, N, or T
  MISC_FEATURE (28)..(28): X is P or A
  MISC_FEATURE (29)..(29): X is F, W, A, or T
  MISC_FEATURE (30)..(30): X is E, D, or K
  MISC_FEATURE (33)..(33): X is E, R, H, or K
  MISC_FEATURE (34)..(34): X is E, R, D, or K
  MISC_FEATURE (37)..(37): X is E, R, Q, or K
  MISC_FEATURE (38)..(38): X is E, R, H, or K
  MISC_FEATURE (40)..(40): X is E, R, Q, or K
  MISC_FEATURE (41)..(41): X is E, N, Q, or K
  MISC_FEATURE (42)..(42): X is S, E, V or T
  MISC_FEATURE (43)..(43): X is V or A
  MISC_FEATURE (44)..(44): X is E, K ,R or D
  MISC_FEATURE (45)..(45): X is E, Q ,R or D
  MISC_FEATURE (46)..(46): X is V or A
  MISC_FEATURE (47)..(47): X is R, Q, K or E
  MISC_FEATURE (48)..(48): X is R, K or E
  MISC_FEATURE (49)..(49): X is D, Q, K or E
  MISC_FEATURE (50)..(50): X is A, S or E
  MISC_FEATURE (51)..(51): X is K, R or E
  MISC_FEATURE (52)..(52): X is K, R or A
  MISC_FEATURE (53)..(53): X is K, R or D
  MISC_FEATURE (54)..(54): X is K, R, E or N
  MISC_FEATURE (55)..(55): X is K, R, E or N
  MISC_FEATURE (57)..(57): X is K, R, E or N
XXLAXXIXXXIXXAXXXXXXAXXXGXXXXXAAXXAAXXIXXXXXXXXXXXXXXXXGX

SEQ ID NO: 226 - protein, 57 aa, Artificial Sequence
  Synthetic
SKEEELIEKARRVAKEAIEEAKRQGKDPSEAKKAAEKLIKAVEEAVKEAKRLKEEGN

SEQ ID NO: 227 - protein, 57 aa, Artificial Sequence
  Synthetic
SELAELISEAIQVAVEAVEEAVRQGKDPFKAAEAAAELIRAVVEAVKEAERLKREGN

SEQ ID NO: 228 - protein, 57 aa, Artificial Sequence
  Synthetic
SELAKKINDTIREAVREVQQAVEDGKDPFEAAREAAEKIRESVERVREEEEKKRRGN

SEQ ID NO: 229 - protein, 36 aa, Artificial Sequence
  Synthetic
  MISC_FEATURE (1)..(1): X is S or T
  MISC_FEATURE (2)..(2): X is N, D or T
  MISC_FEATURE (3)..(3): X is E, D or Q
  MISC_FEATURE (4)..(4): X is E, D or Q
  MISC_FEATURE (5)..(5): X is E, D, N or K
  MISC_FEATURE (6)..(6): X is E, R, Q or K
  MISC_FEATURE (7)..(7): X is E, R or K
  MISC_FEATURE (8)..(8): X is D, I, R or K
  MISC_FEATURE (10)..(10): X is D, E, R or K
  MISC_FEATURE (11)..(11): X is D, E, R or K
  MISC_FEATURE (13)..(13): X is Q, E, R or K
  MISC_FEATURE (14)..(14): X is Q, E or K
  MISC_FEATURE (17)..(17): X is R, N, E or K
  MISC_FEATURE (19)..(19): X is P, S, or T
  MISC_FEATURE (20)..(20): X is D or N
  MISC_FEATURE (22)..(22): X is D, E, S or N
  MISC_FEATURE (23)..(23): X is L, K, N or D
  MISC_FEATURE (24)..(24): X is L or I
  MISC_FEATURE (25)..(25): X is R, K, D or E
  MISC_FEATURE (26)..(26): X is R, K, T or E
  MISC_FEATURE (28)..(28): X is I, L or V
  MISC_FEATURE (29)..(29): X is E, K, R or D
  MISC_FEATURE (30)..(30): X is E, L, R or Q
  MISC_FEATURE (32)..(32): X is E, K, D or Q
  MISC_FEATURE (33)..(33): X is E, K, R or Q
  MISC_FEATURE (34)..(34): X is E, S, T or Q
  MISC_FEATURE (36)..(36): X is S or T
XXXXXXXXLXXAXXAAXSXXPXXXXXAXXXAXXXGX

SEQ ID NO: 230 - protein, 35 aa, Artificial Sequence
  Synthetic
  MISC_FEATURE (1)..(1): X is N, E, or D
  MISC_FEATURE (2)..(2): X is R, E, K or Q
  MISC_FEATURE (4)..(5): X is K or E
  MISC_FEATURE (9)..(9): X is R, D, I or E
  MISC_FEATURE (12)..(12): X is R, K or E
  MISC_FEATURE (13)..(13): X is V or E
  MISC_FEATURE (16)..(16): X is K, D, R or E
  MISC_FEATURE (17)..(17): X is S or A
  MISC_FEATURE (18)..(18): X is S, T or P
  MISC_FEATURE (19)..(19): X is D or N
  MISC_FEATURE (21)..(21): X is E, Q, D or N
  MISC_FEATURE (23)..(23): X is I or L
  MISC_FEATURE (24)..(24): X is R, K, E, or D
  MISC_FEATURE (25)..(25): X is T, K, L, or Q
  MISC_FEATURE (27)..(27): X is I or V
  MISC_FEATURE (28)..(28): X is R, K or E
  MISC_FEATURE (29)..(29): X is A or W
  MISC_FEATURE (31)..(31): X is E, K, Q, or R
  MISC_FEATURE (32)..(32): X is E or R
  MISC_FEATURE (33)..(33): X is S or Q
  MISC_FEATURE (35)..(35): X is S or T
XXAXXIILXAAXXAAXXXXPXLXXXAXXXAXXXGX

SEQ ID NO: 231 - protein, 34 aa, Artificial Sequence
  Synthetic
  MISC_FEATURE (1)..(1): X is E or D
  MISC_FEATURE (2)..(2): X is K, Q, E or D
  MISC_FEATURE (4)..(4): X is K or R
  MISC_FEATURE (5)..(5): X is K , Eor R
  MISC_FEATURE (8)..(8): X is K, E, L or R
  MISC_FEATURE (9)..(9): X is L, T, I or R
  MISC_FEATURE (12)..(12): X is E, D, K, or R
  MISC_FEATURE (13)..(13): X is E, V or Q
  MISC_FEATURE (15)..(15): X is E, K or Q
  MISC_FEATURE (16)..(16): X is R, K or N
  MISC_FEATURE (17)..(17): X is S, A or E
  MISC_FEATURE (18)..(18): X is S, P or Q
  MISC_FEATURE (19)..(19): X is D or N
  MISC_FEATURE (20)..(20): X is P or E
  MISC_FEATURE (21)..(21): X is D, N or E
  MISC_FEATURE (23)..(23): X is Q or L
  MISC_FEATURE (24)..(24): X is K, E, or R
  MISC_FEATURE (25)..(25): X is K, E, T or L
  MISC_FEATURE (27)..(27): X is K, E, R or Q
  MISC_FEATURE (28)..(28): X is K, E, or R
  MISC_FEATURE (29)..(29): X is A or W
  MISC_FEATURE (30)..(30): X is R, E, A or K
  MISC_FEATURE (31)..(31): X is R, E, N or K
  MISC_FEATURE (32)..(32): X is R, E, Q or K
  MISC_FEATURE (33)..(33): X is S, L, Q or E
XXAXXIIXXAAXXAXXXXXXXLXXXAXXXXXXXG

SEQ ID NO: 232 - protein, 36 aa, Artificial Sequence
  Synthetic
SNEQEKKDLKKAEEAAKSPDPELIREAIERAEESGS

SEQ ID NO: 233 - protein, 35 aa, Artificial Sequence
  Synthetic
NKAKEIILRAAEEAAKSPDPELIRLAIEAAERSGS

SEQ ID NO: 234 - protein, 34 aa, Artificial Sequence
  Synthetic
EKAKEIIKRAAEEAQKSPDPELQKLAKEARERLG

SEQ ID NO: 235 - protein, 36 aa, Artificial Sequence
  Synthetic
  MISC_FEATURE (1)..(1): X is S, D or N
  MISC_FEATURE (2)..(2): X is S, D or T
  MISC_FEATURE (3)..(3): X is D or E
  MISC_FEATURE (4)..(4): X is D, T, S or E
  MISC_FEATURE (5)..(5): X is D, K or E
  MISC_FEATURE (6)..(6): X is R, K or E
  MISC_FEATURE (8)..(8): X is Q, K or E
  MISC_FEATURE (9)..(9): X is K or R
  MISC_FEATURE (10)..(10): X is D, L, K or A
  MISC_FEATURE (12)..(12): X is D, K or R
  MISC_FEATURE (13)..(13): X is E or S
  MISC_FEATURE (15)..(15): X is A or S
  MISC_FEATURE (16)..(16): X is E, N or K
  MISC_FEATURE (17)..(17): X is S or T
  MISC_FEATURE (20)..(20): X is D, N or T
  MISC_FEATURE (21)..(21): X is P or S
  MISC_FEATURE (22)..(22): X is E, N or T
  MISC_FEATURE (23)..(23): X is W, A, L or Y
  MISC_FEATURE (25)..(25): X is R, K or E
  MISC_FEATURE (26)..(26): X is R, K or E
  MISC_FEATURE (29)..(29): X is R, D, N or E
  MISC_FEATURE (30)..(30): X is L, Q, T or D
  MISC_FEATURE (32)..(32): X is R, K, T or S
  MISC_FEATURE (33)..(33): X is R, K, E or N
  MISC_FEATURE (34)..(34): X is S or Q
  MISC_FEATURE (36)..(36): X is D, N or T
XXXXXXLXXXAXXAXXXGAXXXXLXXIVXXAXXXGX

SEQ ID NO: 236 - protein, 35 aa, Artificial Sequence
  Synthetic
  MISC_FEATURE (1)..(1): X is S, D, or P
  MISC_FEATURE (2)..(2): X is E or Q
  MISC_FEATURE (3)..(3): X is V or A
  MISC_FEATURE (4)..(4): X is I or K
  MISC_FEATURE (5)..(5): X is E or K
  MISC_FEATURE (8)..(8): X is S, E or K
  MISC_FEATURE (9)..(9): X is R, A, L or K
  MISC_FEATURE (12)..(12): X is E, Q, or D
  MISC_FEATURE (15)..(15): X is E or K
  MISC_FEATURE (16)..(16): X is S or T
  MISC_FEATURE (19)..(19): X is D, N or T
  MISC_FEATURE (20)..(20): X is P or A
  MISC_FEATURE (21)..(21): X is E, R, K or Q
  MISC_FEATURE (22)..(22): X is W, A, L or Y
  MISC_FEATURE (24)..(24): X is W or L
  MISC_FEATURE (25)..(25): X is R, Q, or K
  MISC_FEATURE (28)..(28): X is R, Q, E or D
  MISC_FEATURE (29)..(29): X is Q, E or T
  MISC_FEATURE (31)..(31): X is R, S,  E or T
  MISC_FEATURE (32)..(32): X is K, N,  E or D
  MISC_FEATURE (33)..(33): X is S or E
  MISC_FEATURE (35)..(35): X is S, D or N
XXXXXLAXXALXAAXXGAXXXXLXXIVXXAXXXGX

SEQ ID NO: 237 - protein, 34 aa, Artificial Sequence
  Synthetic
  MISC_FEATURE (1)..(1): X is E, P, D, or K
  MISC_FEATURE (2)..(2): X is E, N, Q, or K
  MISC_FEATURE (3)..(3): X is V or A
  MISC_FEATURE (4)..(4): X is I or K
  MISC_FEATURE (5)..(5): X is E, R or K
  MISC_FEATURE (6)..(6): X is E, L or A
  MISC_FEATURE (9)..(9): X is E, R, Q or K
  MISC_FEATURE (12)..(12): X is E, R, D or K
  MISC_FEATURE (13)..(13): X is E, R, or D
  MISC_FEATURE (15)..(15): X is R or K
  MISC_FEATURE (16)..(16): X is E or K
  MISC_FEATURE (18)..(18): X is Q, H or K
  MISC_FEATURE (19)..(19): X is D, N or T
  MISC_FEATURE (20)..(20): X is P or A
  MISC_FEATURE (21)..(21): X is K, R, E or H
  MISC_FEATURE (22)..(22): X is Q, R, E or D
  MISC_FEATURE (24)..(24): X is L or W
  MISC_FEATURE (25)..(25): X is E, K or R
  MISC_FEATURE (26)..(26): X is E or K
  MISC_FEATURE (28)..(28): X is R, Q, K or A
  MISC_FEATURE (29)..(29): X is K, E or T
  MISC_FEATURE (30)..(30): X is K, N, S or R
  MISC_FEATURE (31)..(31): X is E or T
  MISC_FEATURE (32)..(32): X is E, K, D or R
  MISC_FEATURE (33)..(33): X is S, R, K or E
XXXXXXAKXALXXAXXGXXXXXLXXXVXXXXXXG

SEQ ID NO: 238 - protein, 36 aa, Artificial Sequence
  Synthetic
SSEEEELEKDAREASESGADPEWLREIVDLARESGD

SEQ ID NO: 239 - protein, 35 aa, Artificial Sequence
  Synthetic
SEVIELAKRALEAAKSGADPEWLLRIVRQAEESGS

SEQ ID NO: 240 - protein, 34 aa, Artificial Sequence
  Synthetic
EEVIELAKRALEEAKKGKDPKELLEEVRKREESG

SEQ ID NO: 241 - protein, 40 aa, Artificial Sequence
  Synthetic
  MISC_FEATURE (1)..(1): X is S or D
  MISC_FEATURE (2)..(2): X is T or D
  MISC_FEATURE (3)..(3): X is K, E, Q or D
  MISC_FEATURE (4)..(4): X is K, E, T or D
  MISC_FEATURE (5)..(5): X is K, L, Q or E
  MISC_FEATURE (6)..(6): X is K, R, D or E
  MISC_FEATURE (7)..(7): X is K, R, D or E
  MISC_FEATURE (8)..(8): X is K, R, D or T
  MISC_FEATURE (9)..(9): X is K, I, E, or A
  MISC_FEATURE (10)..(10): X is K, E or R
  MISC_FEATURE (11)..(11): X is K, E, D or R
  MISC_FEATURE (13)..(13): X is K, E, D or R
  MISC_FEATURE (14)..(14): X is K or R
  MISC_FEATURE (15)..(15): X is E or A
  MISC_FEATURE (16)..(16): X is V or A
  MISC_FEATURE (17)..(17): X is R, E, K or D
  MISC_FEATURE (18)..(18): X is S or A
  MISC_FEATURE (19)..(19): X is S or P
  MISC_FEATURE (20)..(20): X is D or N
  MISC_FEATURE (21)..(21): X is P, A, D or S
  MISC_FEATURE (22)..(22): X is E, K, D or N
  MISC_FEATURE (23)..(23): X is E, A, D or N
  MISC_FEATURE (25)..(25): X is E, R or K
  MISC_FEATURE (26)..(26): X is E, R, Q or K
  MISC_FEATURE (29)..(29): X is E, R or K
  MISC_FEATURE (30)..(30): X is E, A, D or K
  MISC_FEATURE (32)..(32): X is E, A, R or K
  MISC_FEATURE (33)..(33): X is E, R or K
  MISC_FEATURE (35)..(35): X is L, Y or A
  MISC_FEATURE (36)..(36): X is R, K, Q or E
  MISC_FEATURE (37)..(37): X is R, K, N or E
  MISC_FEATURE (38)..(38): X is N or D
  MISC_FEATURE (39)..(39): X is P or D
XXXXXXXXXXXIXXXXXXXXXXXIXXAVXXAXXLXXXXXS

SEQ ID NO: 242 - protein, 39 aa, Artificial Sequence
  Synthetic
  MISC_FEATURE (1)..(1): X is T, D, or E
  MISC_FEATURE (2)..(2): X is D or E
  MISC_FEATURE (4)..(4): X is K, R, Q or E
  MISC_FEATURE (5)..(5): X is K, R or E
  MISC_FEATURE (6)..(6): X is L, A, or I
  MISC_FEATURE (8)..(8): X is R, E, A or S
  MISC_FEATURE (9)..(9): X is R, E, or K
  MISC_FEATURE (12)..(12): X is R, E, Q or K
  MISC_FEATURE (13)..(13): X is R, Q or A
  MISC_FEATURE (15)..(15): X is V or A
  MISC_FEATURE (16)..(16): X is R, E, K or D
  MISC_FEATURE (19)..(19): X is N or D
  MISC_FEATURE (20)..(20): X is P, A or D
  MISC_FEATURE (21)..(21): X is E, S, K or D
  MISC_FEATURE (24)..(24): X is E, K or R
  MISC_FEATURE (25)..(25): X is E, L, A or R
  MISC_FEATURE (28)..(28): X is E, D or R
  MISC_FEATURE (31)..(31): X is E, S or R
  MISC_FEATURE (32)..(32): X is E, Q or H
  MISC_FEATURE (34)..(34): X is L or Y
  MISC_FEATURE (35)..(35): X is R, E, or K
  MISC_FEATURE (36)..(36): X is R, E, D or N
  MISC_FEATURE (37)..(37): X is D or N
  MISC_FEATURE (38)..(38): X is D or P
XXAXXXLXXAIXXAXXAPXXXAIXXAVXAAXXLXXXXXS

SEQ ID NO: 243 - protein, 38 aa, Artificial Sequence
  Synthetic
  MISC_FEATURE (1)..(1): X is E, D or Q
  MISC_FEATURE (2)..(2): X is E, D or K
  MISC_FEATURE (4)..(4): X is E, Q, R or K
  MISC_FEATURE (5)..(5): X is E, R or K
  MISC_FEATURE (6)..(6): X is L, I or A
  MISC_FEATURE (8)..(8): X is R, E, or K
  MISC_FEATURE (9)..(9): X is R, E, T or K
  MISC_FEATURE (12)..(12): X is R, E, Q or K
  MISC_FEATURE (13)..(13): X is R, E, S or A
  MISC_FEATURE (15)..(15): X is K, Q or E
  MISC_FEATURE (16)..(16): X is K, R, N or E
  MISC_FEATURE (19)..(19): X is  N or D
  MISC_FEATURE (20)..(20): X is  P, S, E or K
  MISC_FEATURE (21)..(21): X is  D, N, E or K
  MISC_FEATURE (23)..(23): X is Q or R
  MISC_FEATURE (24)..(24): X is K, D, E or R
  MISC_FEATURE (25)..(25): X is K, A, E or L
  MISC_FEATURE (27)..(27): X is K or E
  MISC_FEATURE (28)..(28): X is K, R, Q or E
  MISC_FEATURE (30)..(30): X is K, R, Q or E
  MISC_FEATURE (31)..(31): X is K, R, or E
  MISC_FEATURE (32)..(32): X is Q, D, R, or E
  MISC_FEATURE (34)..(34): X is K, D, R, or E
  MISC_FEATURE (35)..(35): X is K, R, or E
  MISC_FEATURE (36)..(36): X is N, Q, D, or E
  MISC_FEATURE (37)..(37): X is N or D
  MISC_FEATURE (38)..(38): X is P or D
XXAXXXLXXAIXXAXXAPXXXAXXXAXXAXXXLXXXXX

SEQ ID NO: 244 - protein, 40 aa, Artificial Sequence
  Synthetic
STKEEKERIERIEKEVRSPDPENIREAVRKAEELLRENPS

SEQ ID NO: 245 - protein, 39 aa, Artificial Sequence
  Synthetic
TEAEELLRRAIEAAVRAPDPEAIREAVRAAEELLRENPS

SEQ ID NO: 246 - protein, 38 aa, Artificial Sequence
  Synthetic
EEAKELLRRAIESAKKAPDPEAQREAKRAEEELRKEDP

SEQ ID NO: 247 - protein, 41 aa, Artificial Sequence
  Synthetic
  MISC_FEATURE (1)..(1): X is N or D
  MISC_FEATURE (2)..(2): X is S or D
  MISC_FEATURE (3)..(3): X is R, E, H or D
  MISC_FEATURE (4)..(4): X is A, E, or S
  MISC_FEATURE (5)..(5): X is R, E, or K
  MISC_FEATURE (6)..(6): X is E or K
  MISC_FEATURE (7)..(7): X is D, L, E or K
  MISC_FEATURE (9)..(9): X is R, E or K
  MISC_FEATURE (10)..(10): X is R, E or K
  MISC_FEATURE (11)..(11): X is I or V
  MISC_FEATURE (12)..(12): X is A or V
  MISC_FEATURE (13)..(13): X is K or E
  MISC_FEATURE (14)..(14): X is R, Q, K or E
  MISC_FEATURE (16)..(16): X is Q or K
  MISC_FEATURE (17)..(17): X is E or K
  MISC_FEATURE (20)..(20): X is F or Y
  MISC_FEATURE (21)..(21): X is D or N
  MISC_FEATURE (22)..(22): X is P or S
  MISC_FEATURE (23)..(23): X is E, N, T, or K
  MISC_FEATURE (24)..(24): X is E, Q, T, or K
  MISC_FEATURE (26)..(26): X is E, Q or K
  MISC_FEATURE (27)..(27): X is E, R or K
  MISC_FEATURE (30)..(30): X is E, R, D or K
  MISC_FEATURE (31)..(31): X is E, R, Q or K
  MISC_FEATURE (32)..(32): X is V or L
  MISC_FEATURE (33)..(33): X is I, Q or R
  MISC_FEATURE (34)..(34): X is E, K or R
  MISC_FEATURE (37)..(37): X is E, Q or R
  MISC_FEATURE (38)..(38): X is E, Q or R
  MISC_FEATURE (39)..(39): X is K, T, or H
  MISC_FEATURE (41)..(41): X is N or D
XXXXXXXAXXXXXXAXXSGXXXXXVXXALXXXXXVAXXXGX

SEQ ID NO: 248 - protein, 40 aa, Artificial Sequence
  Synthetic
  MISC_FEATURE (1)..(1): X is S, P or R
  MISC_FEATURE (2)..(2): X is E or D
  MISC_FEATURE (4)..(4): X is L or A
  MISC_FEATURE (5)..(5): X is K, E, or R
  MISC_FEATURE (6)..(6): X is K, E, Q or D
  MISC_FEATURE (9)..(9): X is K, E, R or D
  MISC_FEATURE (10)..(10): X is I or V
  MISC_FEATURE (11)..(11): X is A or V
  MISC_FEATURE (12)..(12): X is E, R, or K
  MISC_FEATURE (13)..(13): X is E or Q
  MISC_FEATURE (16)..(16): X is R, E or K
  MISC_FEATURE (20)..(20): X is D or N
  MISC_FEATURE (21)..(21): X is P or A
  MISC_FEATURE (23)..(23): X is E, Q, or D
  MISC_FEATURE (26)..(26): X is K, R, or D
  MISC_FEATURE (30)..(30): X is K, R, or E
  MISC_FEATURE (31)..(31): X is V or L
  MISC_FEATURE (33)..(33): X is R, E, or K
  MISC_FEATURE (36)..(36): X is E or Q
  MISC_FEATURE (37)..(37): X is E, R or D
  MISC_FEATURE (38)..(38): X is T, H, K or S
  MISC_FEATURE (40)..(40): X is N or D
XXAXXXALXXXXXAAXSGYXXAXVAXALAXXIXVAXXXGX

SEQ ID NO: 249 - protein, 39 aa, Artificial Sequence
  Synthetic
  MISC_FEATURE (1)..(1): X is P, Q, or R
  MISC_FEATURE (2)..(2): X is E or D
  MISC_FEATURE (3)..(3): X is E, S, A or D
  MISC_FEATURE (4)..(4): X is L or A
  MISC_FEATURE (5)..(5): X is K, E, R, or N
  MISC_FEATURE (6)..(6): X is K, E, or R
  MISC_FEATURE (9)..(9): X is K, E, or R
  MISC_FEATURE (10)..(10): X is E or R
  MISC_FEATURE (11)..(11): X is V or A
  MISC_FEATURE (12)..(12): X is L, E, R or S
  MISC_FEATURE (13)..(13): X is E, R or K
  MISC_FEATURE (16)..(16): X is E, R or K
  MISC_FEATURE (17)..(17): X is E, R, Q or K
  MISC_FEATURE (19)..(19): X is E, R, T or K
  MISC_FEATURE (20)..(20): X is D or N
  MISC_FEATURE (21)..(21): X is P or A
  MISC_FEATURE (23)..(23): X is Q, D, K or E
  MISC_FEATURE (26)..(26): X is D, K or E
  MISC_FEATURE (27)..(27): X is K or E
  MISC_FEATURE (30)..(30): X is K, R or E
  MISC_FEATURE (31)..(31): X is Q or E
  MISC_FEATURE (33)..(33): X is R, K, Q or E
  MISC_FEATURE (34)..(34): X is R, K, D or E
  MISC_FEATURE (35)..(35): X is N, A, R or D
  MISC_FEATURE (36)..(36): X is Q, E, or T
  MISC_FEATURE (37)..(37): X is D, Q, E, or K
  MISC_FEATURE (38)..(38): X is R, E, or K
XXXXXXALXXXXXAAXXGXXXAXVAXXLAXXIXXXXXXG

SEQ ID NO: 250 - protein, 41 aa, Artificial Sequence
  Synthetic
NSREEEEAKRIVKEAKKSGFDPEEVEKALREVIRVAEETGN

SEQ ID NO: 251 - protein, 40 aa, Artificial Sequence
  Synthetic
SEALKEALKIVEEAAKSGYDPAEVAKALAEVIRVAEETGN

SEQ ID NO: 252 - protein, 39 aa, Artificial Sequence
  Synthetic
PEELKEALKRVLEAAKRGEDPAQVAKELAEEIRRNQEEG

SEQ ID NO: 253 - protein, 41 aa, Artificial Sequence
  Synthetic
  MISC_FEATURE (1)..(1): X is D, T, or S
  MISC_FEATURE (2)..(2): X is T or S
  MISC_FEATURE (3)..(3): X is E or D
  MISC_FEATURE (4)..(4): X is E, Q or D
  MISC_FEATURE (5)..(5): X is E, W or S
  MISC_FEATURE (6)..(6): X is Q, K, A, or E
  MISC_FEATURE (7)..(7): X is E, K, N or R
  MISC_FEATURE (8)..(8): X is D, K, N or R
  MISC_FEATURE (9)..(9): X is I or A
  MISC_FEATURE (10)..(10): X is R, E, K or Q
  MISC_FEATURE (11)..(11): X is R, E, K or N
  MISC_FEATURE (12)..(12): X is I or T
  MISC_FEATURE (13)..(13): X is L, A, V, or W
  MISC_FEATURE (14)..(14): X is K, E, N or R
  MISC_FEATURE (15)..(15): X is K, E, N or D
  MISC_FEATURE (17)..(17): X is R, Q, T or D
  MISC_FEATURE (18)..(18): X is R, K or N
  MISC_FEATURE (19)..(19): X is D, S or Q
  MISC_FEATURE (21)..(21): X is D, S, T or N
  MISC_FEATURE (22)..(22): X is D, K, E or N
  MISC_FEATURE (23)..(23): X is D, E or S
  MISC_FEATURE (24)..(24): X is D, A, Q or S
  MISC_FEATURE (25)..(25): X is L or I
  MISC_FEATURE (26)..(26): X is R, Q, K or I
  MISC_FEATURE (27)..(27): X is R, Q, K or E
  MISC_FEATURE (30)..(30): X is D, N, K or E
  MISC_FEATURE (31)..(31): X is D, R, K or E
  MISC_FEATURE (32)..(32): X is V or I
  MISC_FEATURE (34)..(34): X is Q, R, K or E
  MISC_FEATURE (35)..(35): X is L, E, I or V
  MISC_FEATURE (37)..(37): X is K, E, R or S
  MISC_FEATURE (38)..(38): X is K, E, D or Q
  MISC_FEATURE (39)..(39): X is S or A
  MISC_FEATURE (40)..(40): X is Q, T, N, or R
  MISC_FEATURE (41)..(41): X is T, S, or D
XXXXXXXXXXXXXXXAXXXGXXXXXXXAIXXXAXXAXXXXX

SEQ ID NO: 254 - protein, 40 aa, Artificial Sequence
  Synthetic
  MISC_FEATURE (1)..(1): X is S or P
  MISC_FEATURE (2)..(2): X is E, D or S
  MISC_FEATURE (4)..(4): X is L or W
  MISC_FEATURE (5)..(5): X is E, K, A or R
  MISC_FEATURE (6)..(6): X is E, H, L or R
  MISC_FEATURE (8)..(8): X is I or A
  MISC_FEATURE (9)..(9): X is R, E, D or K
  MISC_FEATURE (10)..(10): X is R, E, V or L
  MISC_FEATURE (12)..(12): X is A, E, V or L
  MISC_FEATURE (13)..(13): X is R, E, or K
  MISC_FEATURE (14)..(14): X is I, A, or L
  MISC_FEATURE (16)..(16): X is K, D, E or Q
  MISC_FEATURE (17)..(17): X is R, D, E or Q
  MISC_FEATURE (18)..(18): X is S or A
  MISC_FEATURE (20)..(20): X is S, N or D
  MISC_FEATURE (21)..(21): X is E, P, N or D
  MISC_FEATURE (22)..(22): X is E, R or D
  MISC_FEATURE (23)..(23): X is A or V
  MISC_FEATURE (24)..(24): X is L or I
  MISC_FEATURE (25)..(25): X is R, K, A or I
  MISC_FEATURE (26)..(26): X is R, K, E or Q
  MISC_FEATURE (29)..(29): X is R, D, E or Q
  MISC_FEATURE (31)..(31): X is V or I
  MISC_FEATURE (33)..(33): X is E, R, D or K
  MISC_FEATURE (36)..(36): X is E, R, S or K
  MISC_FEATURE (37)..(37): X is E, Q, D or K
  MISC_FEATURE (39)..(39): X is T, Q, D or N
  MISC_FEATURE (40)..(40): X is T, S, D or N
XXVXXXAXXXIXXXAXXXGXXXXXXXAIXAXAXIAXXAXX

SEQ ID NO: 255 - protein, 39 aa, Artificial Sequence
  Synthetic
  MISC_FEATURE (2)..(2): X is R, N, E, or D
  MISC_FEATURE (4)..(4): X is L or W
  MISC_FEATURE (5)..(5): X is E, K or R
  MISC_FEATURE (6)..(6): X is E, T, A, or H
  MISC_FEATURE (8)..(8): X is I, K, A, or Q
  MISC_FEATURE (9)..(9): X is R, K or E
  MISC_FEATURE (10)..(10): X is V, R, Q or E
  MISC_FEATURE (12)..(12): X is K, R, Q or E
  MISC_FEATURE (13)..(13): X is K, R, Q or E
  MISC_FEATURE (14)..(14): X is I, A or L
  MISC_FEATURE (16)..(16): X is K, E, D, or R
  MISC_FEATURE (17)..(17): X is Q, E, D, or N
  MISC_FEATURE (18)..(18): X is S or A
  MISC_FEATURE (20)..(20): X is S, D or N
  MISC_FEATURE (21)..(21): X is P, D, S or E
  MISC_FEATURE (22)..(22): X is D, K or E
  MISC_FEATURE (23)..(23): X is A or V
  MISC_FEATURE (24)..(24): X is R, K, E or I
  MISC_FEATURE (25)..(25): X is R, K, or E
  MISC_FEATURE (26)..(26): X is Q, L, K, or E
  MISC_FEATURE (28)..(28): X is Q, R, K, or E
  MISC_FEATURE (29)..(29): X is R, K, or E
  MISC_FEATURE (31)..(31): X is I, Q, K, or E
  MISC_FEATURE (32)..(32): X is R, D, K, or E
  MISC_FEATURE (33)..(33): X is R, Q, T, or E
  MISC_FEATURE (35)..(35): X is R, K, D, or E
  MISC_FEATURE (36)..(36): X is R, K, or D
  MISC_FEATURE (37)..(37): X is R, K, Q or D
  MISC_FEATURE (39)..(39): X is T, N, Q or D
PXVXXXAXXXIXXXAXXXGXXXXXXXAXXAXXXIXXXAX

SEQ ID NO: 256 - protein, 41 aa, Artificial Sequence
  Synthetic
DSEEEQERIRRILKEARKSGTEESLRQAIEDVAQLAKKSQD

SEQ ID NO: 257 - protein, 40 aa, Artificial Sequence
  Synthetic
SEVLEEAIRVILRIAKESGSEEALRQAIRAVAEIAKEAQD

SEQ ID NO: 258 - protein, 39 aa, Artificial Sequence
  Synthetic
PRVLEEAIRVIRQIAEESGSEEARRQAERAEEEIRRRAQ

SEQ ID NO: 259 - protein, 44 aa, Artificial Sequence
  Synthetic
  MISC_FEATURE (1)..(1): X is D, S, N or T
  MISC_FEATURE (2)..(2): X is S, P or T
  MISC_FEATURE (3)..(3): X is E, D or S
  MISC_FEATURE (4)..(4): X is E, D or R
  MISC_FEATURE (5)..(5): X is V, A, E or L
  MISC_FEATURE (6)..(6): X is K, R, E or L
  MISC_FEATURE (7)..(7): X is K, R, E or D
  MISC_FEATURE (8)..(8): X is E, T, K or I
  MISC_FEATURE (9)..(9): X is V or A
  MISC_FEATURE (10)..(10): X is E, R, K or D
  MISC_FEATURE (11)..(11): X is E, R, K or D
  MISC_FEATURE (13)..(13): X is E, Q, K or T
  MISC_FEATURE (14)..(14): X is E, K or R
  MISC_FEATURE (15)..(15): X is E, I, T or R
  MISC_FEATURE (16)..(16): X is Y or W
  MISC_FEATURE (17)..(17): X is R, K, Q or D
  MISC_FEATURE (18)..(18): X is K or E
  MISC_FEATURE (19)..(19): X is N, H, R, or D
  MISC_FEATURE (23)..(23): X is E, R, or D
  MISC_FEATURE (24)..(24): X is E, K, or D
  MISC_FEATURE (26)..(26): X is E, K, R or H
  MISC_FEATURE (27)..(27): X is E, K, or R
  MISC_FEATURE (28)..(28): X is Q, A,  or S
  MISC_FEATURE (30)..(30): X is K, R, or E
  MISC_FEATURE (31)..(31): X is Q, K, R, or E
  MISC_FEATURE (34)..(34): X is K or E
  MISC_FEATURE (35)..(35): X is R, A, or D
  MISC_FEATURE (37)..(37): X is E, K, Q or R
  MISC_FEATURE (38)..(38): X is E or K
  MISC_FEATURE (39)..(39): X is A or L
  MISC_FEATURE (41)..(41): X is R, K, D or E
  MISC_FEATURE (42)..(42): X is S, L, K or N
  MISC_FEATURE (43)..(43): X is S or P
  MISC_FEATURE (44)..(44): X is S, D, T or N
XXXXXXXXXXXAXXXXXXXPGSXXAXXXLXXAVXXAXXXAXXXX

SEQ ID NO: 260 - protein, 43 aa, Artificial Sequence
  Synthetic
  MISC_FEATURE (1)..(1): X is P, W, A, or E
  MISC_FEATURE (2)..(2): X is K, D or E
  MISC_FEATURE (4)..(4): X is V, A or L
  MISC_FEATURE (5)..(5): X is Q, E, D or K
  MISC_FEATURE (6)..(6): X is V, A or T
  MISC_FEATURE (8)..(8): X is V or A
  MISC_FEATURE (9)..(9): X is E, R, K or N
  MISC_FEATURE (10)..(10): X is A or I
  MISC_FEATURE (12)..(12): X is T, Q, K or E
  MISC_FEATURE (13)..(13): X is I, Q, K or R
  MISC_FEATURE (14)..(14): X is I or V
  MISC_FEATURE (15)..(15): X is Y or W
  MISC_FEATURE (16)..(16): X is E, Q, K or D
  MISC_FEATURE (17)..(17): X is N, T or D
  MISC_FEATURE (18)..(18): X is T or E
  MISC_FEATURE (22)..(22): X is D, Q or E
  MISC_FEATURE (23)..(23): X is L, A, N or E
  MISC_FEATURE (25)..(25): X is K, R or E
  MISC_FEATURE (26)..(26): X is K, R, T or E
  MISC_FEATURE (29)..(29): X is K, R or E
  MISC_FEATURE (30)..(30): X is I, L or A
  MISC_FEATURE (33)..(33): X is R, D, or E
  MISC_FEATURE (36)..(36): X is R or E
  MISC_FEATURE (37)..(37): X is N, A, R or E
  MISC_FEATURE (38)..(38): X is A or L
  MISC_FEATURE (40)..(40): X is R, E, or N
  MISC_FEATURE (41)..(41): X is L, S or N
  MISC_FEATURE (42)..(42): X is S or P
  MISC_FEATURE (43)..(43): X is D, N, S or T
XXAXXXAXXXAXXXXXXXPGSXXAXXALXXAVXAAXXXAXXXX

SEQ ID NO: 261 - protein, 42 aa, Artificial Sequence
  Synthetic
  MISC_FEATURE (1)..(1): X is P, S or T
  MISC_FEATURE (2)..(2): X is E, K, Q, or D
  MISC_FEATURE (4)..(4): X is V, A or L
  MISC_FEATURE (5)..(5): X is R, K, E or D
  MISC_FEATURE (6)..(6): X is V, T, A, or K
  MISC_FEATURE (8)..(8): X is E, Q, K or R
  MISC_FEATURE (9)..(9): X is E, T, K or R
  MISC_FEATURE (10)..(10): X is A or I
  MISC_FEATURE (12)..(12): X is D, K or E
  MISC_FEATURE (13)..(13): X is Q, I, R or T
  MISC_FEATURE (14)..(14): X is I or V
  MISC_FEATURE (15)..(15): X is R, Y, W or I
  MISC_FEATURE (16)..(16): X is K, Q, or E
  MISC_FEATURE (17)..(17): X is N or T
  MISC_FEATURE (18)..(18): X is E or T
  MISC_FEATURE (22)..(22): X is E or D
  MISC_FEATURE (23)..(23): X is L, A, E or N
  MISC_FEATURE (25)..(25): X is E or K
  MISC_FEATURE (26)..(26): X is R, T, E or K
  MISC_FEATURE (28)..(28): X is D, Q, R or K
  MISC_FEATURE (29)..(29): X is N, E, R or K
  MISC_FEATURE (30)..(30): X is I, L or A
  MISC_FEATURE (31)..(31): X is K or A
  MISC_FEATURE (32)..(32): X is K or E
  MISC_FEATURE (33)..(33): X is R, Q, K or E
  MISC_FEATURE (35)..(35): X is R, Q, K or E
  MISC_FEATURE (36)..(36): X is R, Q, K or E
  MISC_FEATURE (37)..(37): X is L, N, V, or A
  MISC_FEATURE (38)..(38): X is L, K, R, or A
  MISC_FEATURE (39)..(39): X is D, K, E, or N
  MISC_FEATURE (40)..(40): X is K, E, or R
  MISC_FEATURE (41)..(41): X is L, S, A or N
  MISC_FEATURE (42)..(42): X is P or S
XXAXXXAXXXAXXXXXXXPGSXXAXXAXXXXXXAXXXXXXXX

SEQ ID NO: 262 - protein, 44 aa, Artificial Sequence
  Synthetic
DPEEVRREVERATEEYRKNPGSDEAREQLKEAVERAEEAARSPD

SEQ ID NO: 263 - protein, 43 aa, Artificial Sequence
  Synthetic
PEAVQVAVEAATQIYENTPGSEEAKKALEIAVRAAENAARLPD

SEQ ID NO: 264 - protein, 42 aa, Artificial Sequence
  Synthetic
PEAVRVAEEAADQIRKNTPGSELAKRADEIKKRARELLERLP

SEQ ID NO: 265 - protein, 44 aa, Artificial Sequence
  Synthetic
  MISC_FEATURE (1)..(1): X is Q, H, N, or K
  MISC_FEATURE (2)..(2): X is S, D, N or T
  MISC_FEATURE (3)..(3): X is E or D
  MISC_FEATURE (4)..(4): X is E, Q, T or D
  MISC_FEATURE (5)..(5): X is R, Q, A, or D
  MISC_FEATURE (6)..(6): X is K, I or Q
  MISC_FEATURE (7)..(7): X is K, E or R
  MISC_FEATURE (8)..(8): X is K, D or R
  MISC_FEATURE (10)..(10): X is K, Q, E or R
  MISC_FEATURE (11)..(11): X is E or R
  MISC_FEATURE (13)..(13): X is E, A, Q, or K
  MISC_FEATURE (14)..(14): X is E, R, or K
  MISC_FEATURE (15)..(15): X is T, I, or K
  MISC_FEATURE (17)..(17): X is R, E, Q or K
  MISC_FEATURE (18)..(18): X is R, E, T or K
  MISC_FEATURE (19)..(19): X is N, Y, E or H
  MISC_FEATURE (20)..(20): X is T or S
  MISC_FEATURE (22)..(22): X is T or S
  MISC_FEATURE (23)..(23): X is D or E
  MISC_FEATURE (24)..(24): X is D, K, R or E
  MISC_FEATURE (26)..(26): X is K or R
  MISC_FEATURE (27)..(27): X is Q, E, K or N
  MISC_FEATURE (29)..(29): X is V, A, or I
  MISC_FEATURE (30)..(30): X is K, Q, E, or R
  MISC_FEATURE (31)..(31): X is K, D, E, or R
  MISC_FEATURE (34)..(34): X is K, D, E, or R
  MISC_FEATURE (37)..(37): X is K, E, or R
  MISC_FEATURE (38)..(38): X is K, E, or Q
  MISC_FEATURE (40)..(40): X is L or A
  MISC_FEATURE (41)..(41): X is E, K, R, or Q
  MISC_FEATURE (42)..(42): X is E, K, or R
  MISC_FEATURE (44)..(44): X is N or S
XXXXXXXXIXXLXXXAXXXXGXXXAXXAXXXIAXIAXXAXXXGX

SEQ ID NO: 266 - protein, 43 aa, Artificial Sequence
  Synthetic
  MISC_FEATURE (1)..(1): X is A, S, R, or K
  MISC_FEATURE (2)..(2): X is D or E
  MISC_FEATURE (3)..(3): X is T or V
  MISC_FEATURE (5)..(5): X is K, E, I or Q
  MISC_FEATURE (6)..(6): X is E, H, or T
  MISC_FEATURE (9)..(9): X is Q, E, K or R
  MISC_FEATURE (10)..(10): X is E or R
  MISC_FEATURE (12)..(12): X is E, A, K or Q
  MISC_FEATURE (13)..(13): X is K or D
  MISC_FEATURE (14)..(14): X is L, I or V
  MISC_FEATURE (16)..(16): X is R, E, D or S
  MISC_FEATURE (17)..(17): X is D, K, T, or E
  MISC_FEATURE (18)..(18): X is Y or F
  MISC_FEATURE (19)..(19): X is S or T
  MISC_FEATURE (21)..(21): X is S or T
  MISC_FEATURE (22)..(22): X is D, E, or S
  MISC_FEATURE (23)..(23): X is V or A
  MISC_FEATURE (25)..(25): X is S, R, or K
  MISC_FEATURE (26)..(26): X is L or E
  MISC_FEATURE (28)..(28): X is V, A, or I
  MISC_FEATURE (29)..(29): X is K, E, R, or Q
  MISC_FEATURE (30)..(30): X is A or L
  MISC_FEATURE (33)..(33): X is K, E, H or R
  MISC_FEATURE (36)..(36): X is K, E, or Q
  MISC_FEATURE (37)..(37): X is T, V, E, or R
  MISC_FEATURE (39)..(39): X is L or A
  MISC_FEATURE (40)..(40): X is R, K, E or Q
  MISC_FEATURE (41)..(41): X is N or Q
  MISC_FEATURE (43)..(43): X is Y, N or D
XXXAXXAIXXLXXXAXXXXGXXXAXXAXXXIAXIAXXAXXXGX

SEQ ID NO: 267 - protein, 42 aa, Artificial Sequence
  Synthetic
  MISC_FEATURE (1)..(1): X is K, R, S or T
  MISC_FEATURE (2)..(2): X is E or D
  MISC_FEATURE (3)..(3): X is T or V
  MISC_FEATURE (5)..(5): X is E, Q, or K
  MISC_FEATURE (6)..(6): X is E, T, Q, or H
  MISC_FEATURE (8)..(8): X is I or K
  MISC_FEATURE (9)..(9): X is R, D or K
  MISC_FEATURE (10)..(10): X is R, E, Q or S
  MISC_FEATURE (12)..(12): X is R, E, Q or K
  MISC_FEATURE (13)..(13): X is S, E, D or K
  MISC_FEATURE (14)..(14): X is L, I or V
  MISC_FEATURE (15)..(15): X is A or R
  MISC_FEATURE (16)..(16): X is E, D, K or R
  MISC_FEATURE (17)..(17): X is E, D, K or Q
  MISC_FEATURE (18)..(18): X is Y or F
  MISC_FEATURE (19)..(19): X is K, T, E or D
  MISC_FEATURE (21)..(21): X is S or T
  MISC_FEATURE (22)..(22): X is E, D, or Q
  MISC_FEATURE (23)..(23): X is V or A
  MISC_FEATURE (25)..(25): X is K or E
  MISC_FEATURE (26)..(26): X is L, D, Q or E
  MISC_FEATURE (28)..(28): X is K, R or E
  MISC_FEATURE (29)..(29): X is K, Q or E
  MISC_FEATURE (30)..(30): X is A or L
  MISC_FEATURE (32)..(32): X is K, E, R, or Q
  MISC_FEATURE (33)..(33): X is K, E, R, or H
  MISC_FEATURE (35)..(35): X is K, E, or N
  MISC_FEATURE (36)..(36): X is K, E, D or T
  MISC_FEATURE (37)..(37): X is V, E, I or Q
  MISC_FEATURE (38)..(38): X is S or A
  MISC_FEATURE (39)..(39): X is R or K
  MISC_FEATURE (40)..(40): X is E, R or K
  MISC_FEATURE (41)..(41): X is E, R, Q or N
XXXAXXAXXXLXXXXXXXXGXXXAXXAXXXIXXIXXXXXXXG

SEQ ID NO: 268 - protein, 44 aa, Artificial Sequence
  Synthetic
QSEDRKEKIRELERKARENTGSDEARQAVKEIARIAKEALEEGN

SEQ ID NO: 269 - protein, 43 aa, Artificial Sequence
  Synthetic
ADTAKEAIQRLEDLARDYSGSDVASLAVKAIAKIAETALRNGY

SEQ ID NO: 270 - protein, 42 aa, Artificial Sequence
  Synthetic
KETAEEAIKRLRELAEDYKGSEVAKLAEEAIERIEKVSRERG

SEQ ID NO: 271 - protein, 44 aa, Artificial Sequence
  Synthetic
  MISC_FEATURE (2)..(2): X is N, D, S or T
  MISC_FEATURE (3)..(3): X is D or E
  MISC_FEATURE (4)..(4): X is T, R, D or E
  MISC_FEATURE (5)..(5): X is K, D or E
  MISC_FEATURE (6)..(6): X is K or E
  MISC_FEATURE (7)..(7): X is K or E
  MISC_FEATURE (9)..(9): X is K, R or E
  MISC_FEATURE (10)..(10): X is K or E
  MISC_FEATURE (11)..(11): X is L, I, R or K
  MISC_FEATURE (13)..(13): X is K, R, D, or E
  MISC_FEATURE (14)..(14): X is K or R
  MISC_FEATURE (16)..(16): X is E or R
  MISC_FEATURE (17)..(17): X is E, K or Q
  MISC_FEATURE (20)..(20): X is R, E, K or N
  MISC_FEATURE (21)..(21): X is S or L
  MISC_FEATURE (23)..(23): X is D or N
  MISC_FEATURE (24)..(24): X is P or E
  MISC_FEATURE (25)..(25): X is N, D, K or E
  MISC_FEATURE (26)..(26): X is D or A
  MISC_FEATURE (28)..(28): X is K, E, R or Q
  MISC_FEATURE (29)..(29): X is K, E, or R
  MISC_FEATURE (32)..(32): X is D, K, E, or R
  MISC_FEATURE (33)..(33): X is L, T, E, or A
  MISC_FEATURE (35)..(35): X is E, K, or Q
  MISC_FEATURE (36)..(36): X is E, K, or R
  MISC_FEATURE (38)..(38): X is V or I
  MISC_FEATURE (39)..(39): X is R, E, Q ,or K
  MISC_FEATURE (40)..(40): X is E or Q
  MISC_FEATURE (41)..(41): X is R or Q
  MISC_FEATURE (42)..(42): X is P or S
SXXXXXXLXXXLXXAXXLAXXPXXXXLXXAVXXAXXVXXXXXGS

SEQ ID NO: 272 - protein, 43 aa, Artificial Sequence
  Synthetic
  MISC_FEATURE (1)..(1): X is N, E, D or S
  MISC_FEATURE (2)..(2): X is L, N, A, or K
  MISC_FEATURE (4)..(4): X is E or K
  MISC_FEATURE (5)..(5): X is R, T, E or K
  MISC_FEATURE (8)..(8): X is R, E or K
  MISC_FEATURE (12)..(12): X is R, T, D or K
  MISC_FEATURE (15)..(15): X is R, E or K
  MISC_FEATURE (16)..(16): X is A, E or N
  MISC_FEATURE (19)..(19): X is R, E, K or Q
  MISC_FEATURE (22)..(22): X is D, N, or S
  MISC_FEATURE (23)..(23): X is P or E
  MISC_FEATURE (24)..(24): X is N, R, T or E
  MISC_FEATURE (27)..(27): X is K, E, Q, or N
  MISC_FEATURE (28)..(28): X is K, E, R, or A
  MISC_FEATURE (31)..(31): X is K, E, or R
  MISC_FEATURE (34)..(34): X is K or E
  MISC_FEATURE (35)..(35): X is K, D, Q or E
  MISC_FEATURE (37)..(37): X is V or I
  MISC_FEATURE (38)..(38): X is R, N, D or K
  MISC_FEATURE (39)..(39): X is E, T or Q
  MISC_FEATURE (40)..(40): X is R, T or Q
XXAXXALXIILXAAXXLAXLPXXXALXXAVXAAXXVXXXXPGS

SEQ ID NO: 273 - protein, 42 aa, Artificial Sequence
  Synthetic
  MISC_FEATURE (1)..(1): X is E, S, or R
  MISC_FEATURE (2)..(2): X is L, A, N or Q
  MISC_FEATURE (4)..(4): X is K or E
  MISC_FEATURE (5)..(5): X is K, R or E
  MISC_FEATURE (8)..(8): X is K, R, D or E
  MISC_FEATURE (11)..(11): X is K, Q or E
  MISC_FEATURE (12)..(12): X is R, L, T or E
  MISC_FEATURE (15)..(15): X is R, K, T or E
  MISC_FEATURE (16)..(16): X is N , A or E
  MISC_FEATURE (18)..(18): X is K, Q, R or E
  MISC_FEATURE (19)..(19): X is K or R
  MISC_FEATURE (20)..(20): X is S or L
  MISC_FEATURE (22)..(22): X is D, N, or S
  MISC_FEATURE (23)..(23): X is D, E, or P
  MISC_FEATURE (24)..(24): X is E, K, Q, or N
  MISC_FEATURE (26)..(26): X is  K, Q, or R
  MISC_FEATURE (27)..(27): X is  K or E
  MISC_FEATURE (28)..(28): X is  K, R, D or E
  MISC_FEATURE (30)..(30): X is  K or E
  MISC_FEATURE (31)..(31): X is R, K or E
  MISC_FEATURE (33)..(33): X is N, Q, K or E
  MISC_FEATURE (34)..(34): X is N, Q, K or E
  MISC_FEATURE (35)..(35): X is D, R, K or E
  MISC_FEATURE (37)..(37): X is R or K
  MISC_FEATURE (38)..(38): X is D, E, R or K
  MISC_FEATURE (39)..(39): X is E, T, or Q
  MISC_FEATURE (40)..(40): X is R, N or Q
XXAXXALXIIXXAAXXLXXXPXXXAXXXAXXAXXXVXXXXPG

SEQ ID NO: 274 - protein, 44 aa, Artificial Sequence
  Synthetic
SNDEKEKLKELLKRAEELAKSPDPEDLKEAVRLAEEVVRERPGS

SEQ ID NO: 275 - protein, 43 aa, Artificial Sequence
  Synthetic
NLAKKALEIILRAAEELAKLPDPEALKEAVKAAEKVVREQPGS

SEQ ID NO: 276 - protein, 42 aa, Artificial Sequence
  Synthetic
ELAKKALEIIERAAEELKKSPDPEAQKEAKKAEQKVREERPG

SEQ ID NO: 277 - protein, 44 aa, Artificial Sequence
  Synthetic
  MISC_FEATURE (1)..(1): X is T or S
  MISC_FEATURE (2)..(2): X is T, D, N or S
  MISC_FEATURE (3)..(3): X is E, D, or Q
  MISC_FEATURE (5)..(5): X is E, W, D, or A
  MISC_FEATURE (6)..(6): X is R, K, E or N
  MISC_FEATURE (7)..(7): X is R, K, or E
  MISC_FEATURE (8)..(8): X is Q, N, K, or E
  MISC_FEATURE (9)..(9): X is L or I
  MISC_FEATURE (10)..(10): X is E, K, Q, or R
  MISC_FEATURE (11)..(11): X is E or K
  MISC_FEATURE (12)..(12): X is V, A, or I
  MISC_FEATURE (13)..(13): X is A or K
  MISC_FEATURE (14)..(14): X is R, E, Q or K
  MISC_FEATURE (15)..(15): X is R, E, or K
  MISC_FEATURE (17)..(17): X is A, I, or K
  MISC_FEATURE (18)..(18): X is E, K, Q, or R
  MISC_FEATURE (21)..(21): X is E, K, Q, or R
  MISC_FEATURE (22)..(22): X is E, K, D, or R
  MISC_FEATURE (24)..(24): X is N or D
  MISC_FEATURE (25)..(25): X is T, A, N or R
  MISC_FEATURE (26)..(26): X is D, E, or K
  MISC_FEATURE (27)..(27): X is R, E, or Q
  MISC_FEATURE (29)..(29): X is R, E, K or Q
  MISC_FEATURE (30)..(30): X is R, E, or K
  MISC_FEATURE (31)..(31): X is Q or A
  MISC_FEATURE (33)..(33): X is Q, E, R, or D
  MISC_FEATURE (34)..(34): X is K, E, R, or N
  MISC_FEATURE (35)..(35): X is A or I
  MISC_FEATURE (36)..(36): X is L, R, A or I
  MISC_FEATURE (37)..(37): X is E, K,Q or R
  MISC_FEATURE (38)..(38): X is I, E, A or T
  MISC_FEATURE (40)..(40): X is R, N, K or E
  MISC_FEATURE (41)..(41): X is D, Q, K or E
  MISC_FEATURE (42)..(42): X is S, A, Q or T
  MISC_FEATURE (44)..(44): X is S or T
XXXDXXXXXXXXXXXAXXAAXXGXXXXVXXXLXXXXXXAXXXGX

SEQ ID NO: 278 - protein, 43 aa, Artificial Sequence
  Synthetic
  MISC_FEATURE (1)..(1): X is T, D, E or K
  MISC_FEATURE (2)..(2): X is D, E or K
  MISC_FEATURE (4)..(4): X is V, W, or F
  MISC_FEATURE (5)..(5): X is K, E, D, or R
  MISC_FEATURE (6)..(6): X is L, K or R
  MISC_FEATURE (8)..(8): X is Lor I
  MISC_FEATURE (9)..(9): X is E, R, or D
  MISC_FEATURE (10)..(10): X is V or A
  MISC_FEATURE (11)..(11): X is V, I or A
  MISC_FEATURE (12)..(12): X is K or A
  MISC_FEATURE (13)..(13): X is R, E, K or Q
  MISC_FEATURE (14)..(14): X is V or A
  MISC_FEATURE (16)..(16): X is I, K, Q or A
  MISC_FEATURE (17)..(17): X is E, R, Q or A
  MISC_FEATURE (20)..(20): X is R or Q
  MISC_FEATURE (21)..(21): X is R, K or Q
  MISC_FEATURE (24)..(24): X is T, A, N or R
  MISC_FEATURE (25)..(25): X is D or E
  MISC_FEATURE (28)..(28): X is R, K or E
  MISC_FEATURE (29)..(29): X is E, I, K or A
  MISC_FEATURE (32)..(32): X is E, K or R
  MISC_FEATURE (33)..(33): X is V or A
  MISC_FEATURE (34)..(34): X is I or A
  MISC_FEATURE (35)..(35): X is L, Q, I or A
  MISC_FEATURE (36)..(36): X is E, Q, R, or K
  MISC_FEATURE (37)..(37): X is I or A
  MISC_FEATURE (39)..(39): X is R, K, N or D
  MISC_FEATURE (40)..(40): X is E, K, N or D
  MISC_FEATURE (41)..(41): X is S or A
  MISC_FEATURE (43)..(43): X is S or T
XXAXXXAXXXXXXXAXXAAXXGNXXAVXXALXXXXXXAXXXGX

SEQ ID NO: 279 - protein, 42 aa, Artificial Sequence
  Synthetic
  MISC_FEATURE (1)..(1): X is E, D, K or P
  MISC_FEATURE (2)..(2): X is E, D, R or K
  MISC_FEATURE (4)..(4): X is V, W, or F
  MISC_FEATURE (5)..(5): X is R, K, E, or D
  MISC_FEATURE (6)..(6): X is L, W, E, or R
  MISC_FEATURE (8)..(8): X is L, I, E, or Q
  MISC_FEATURE (9)..(9): X is K, E, or R
  MISC_FEATURE (10)..(10): X is V or A
  MISC_FEATURE (11)..(11): X is V, I or A
  MISC_FEATURE (12)..(12): X is K, D, E, or H
  MISC_FEATURE (13)..(13): X is K, R, E, or N
  MISC_FEATURE (14)..(14): X is V or A
  MISC_FEATURE (15)..(15): X is S or A
  MISC_FEATURE (16)..(16): X is D, E, K or R
  MISC_FEATURE (17)..(17): X is A, E, K or Q
  MISC_FEATURE (19)..(19): X is D, E, K or Q
  MISC_FEATURE (20)..(20): X is N, E, K or R
  MISC_FEATURE (21)..(21): X is Q, K or R
  MISC_FEATURE (24)..(24): X is E, S, R or D
  MISC_FEATURE (25)..(25): X is E, S, or D
  MISC_FEATURE (27)..(27): X is V, A, E, or S
  MISC_FEATURE (28)..(28): X is K, E, D, or Q
  MISC_FEATURE (29)..(29): X is E, L, R, or A
  MISC_FEATURE (31)..(31): X is E, K, R, or Q
  MISC_FEATURE (32)..(32): X is E, K, or Q
  MISC_FEATURE (33)..(33): X is V, A or T
  MISC_FEATURE (34)..(34): X is R, E, A or K
  MISC_FEATURE (35)..(35): X is R, E, or K
  MISC_FEATURE (36)..(36): X is R, E, H or K
  MISC_FEATURE (37)..(37): X is I or A
  MISC_FEATURE (38)..(38): X is E, K, Q, or R
  MISC_FEATURE (39)..(39): X is E, K, N, or R
  MISC_FEATURE (40)..(40): X is E, K, N, or D
  MISC_FEATURE (41)..(41): X is S, A, or K
XXAXXXAXXXXXXXXXXAXXXGNXXAXXXAXXXXXXXXXXXG

SEQ ID NO: 280 - protein, 44 aa, Artificial Sequence
  Synthetic
TTEDERRELEKVARKAIEAAREGNTDEVREQLQRALEIARESGT

SEQ ID NO: 281 - protein, 43 aa, Artificial Sequence
  Synthetic
TEAVKLALEVVARVAIEAARRGNTDAVREALEVALEIARESGT

SEQ ID NO: 282 - protein, 42 aa, Artificial Sequence
  Synthetic
EEAVRLALEVVKRVSDEAKKQGNEDAVKEAEEVRKKIEEESG

SEQ ID NO: 283 - protein, 47 aa, Artificial Sequence
  Synthetic
  MISC_FEATURE (1)..(1): X is S, D, or N
  MISC_FEATURE (2)..(2): X is S, T, or N
  MISC_FEATURE (3)..(3): X is V or K
  MISC_FEATURE (5)..(5): X is D, E or K
  MISC_FEATURE (6)..(6): X is T, E or K
  MISC_FEATURE (8)..(8): X is R, E, A or K
  MISC_FEATURE (9)..(9): X is E or K
  MISC_FEATURE (10)..(10): X is R, T, I or K
  MISC_FEATURE (12)..(12): X is E or K
  MISC_FEATURE (13)..(13): X is E or K
  MISC_FEATURE (15)..(15): X is S or A
  MISC_FEATURE (16)..(16): X is K, E, or R
  MISC_FEATURE (17)..(17): X is E or H
  MISC_FEATURE (20)..(20): X is R or K
  MISC_FEATURE (21)..(21): X is E or Q
  MISC_FEATURE (23)..(23): X is K, A or S
  MISC_FEATURE (24)..(24): X is N or D
  MISC_FEATURE (26)..(26): X is N, E or T
  MISC_FEATURE (27)..(27): X is W, A, or K
  MISC_FEATURE (29)..(29): X is E, Q, N or K
  MISC_FEATURE (30)..(30): X is E, R, N or K
  MISC_FEATURE (32)..(32): X is Q or L
  MISC_FEATURE (33)..(33): X is R, E, D, or K
  MISC_FEATURE (36)..(36): X is N, E, D, or K
  MISC_FEATURE (37)..(37): X is E, R, or K
  MISC_FEATURE (39)..(39): X is V or A
  MISC_FEATURE (40)..(40): X is E, R, or K
  MISC_FEATURE (41)..(41): X is V or A
  MISC_FEATURE (43)..(43): X is R, K or Q
  MISC_FEATURE (44)..(44): X is R, K, E or N
  MISC_FEATURE (46)..(46): X is T or Q
  MISC_FEATURE (47)..(47): X is T, S or N
XXXAXXIXXXAXXIXXXLKXXGXXPXXIXXLXXAAXXLXXXAXXAXX

SEQ ID NO: 284 - protein, 46 aa, Artificial Sequence
  Synthetic
  MISC_FEATURE (1)..(1): X is S, P or E
  MISC_FEATURE (2)..(2): X is D, V or K
  MISC_FEATURE (4)..(4): X is L or R
  MISC_FEATURE (5)..(5): X is E or K
  MISC_FEATURE (8)..(8): X is Q, L, E or K
  MISC_FEATURE (9)..(9): X is R, K, L or T
  MISC_FEATURE (11)..(11): X is V or A
  MISC_FEATURE (12)..(12): X is K, E, R or Q
  MISC_FEATURE (15)..(15): X is K, E, R or L
  MISC_FEATURE (16)..(16): X is K, E, R or D
  MISC_FEATURE (19)..(19): X is K, E, R or Q
  MISC_FEATURE (20)..(20): X is E, R or Q
  MISC_FEATURE (22)..(22): X is S or A
  MISC_FEATURE (23)..(23): X is N or D
  MISC_FEATURE (25)..(25): X is K, E or S
  MISC_FEATURE (26)..(26): X is W, A, K or Q
  MISC_FEATURE (29)..(29): X is E or K
  MISC_FEATURE (32)..(32): X is Q, E or K
  MISC_FEATURE (36)..(36): X is D, Q, E or K
  MISC_FEATURE (38)..(38): X is V or A
  MISC_FEATURE (39)..(39): X is E, R, or Q
  MISC_FEATURE (40)..(40): X is V or A
  MISC_FEATURE (42)..(42): X is D or A
  MISC_FEATURE (43)..(43): X is R, E, or K
  MISC_FEATURE (45)..(45): X is T or N
  MISC_FEATURE (46)..(46): X is S or N
XXAXXIAXXAXXIAXXLAXXGXXPXXIAXLLXAAAXLXXXAXXAXX

SEQ ID NO: 285 - protein, 45 aa, Artificial Sequence
  Synthetic
  MISC_FEATURE (1)..(1): X is P, S, or E
  MISC_FEATURE (2)..(2): X is K, D, or E
  MISC_FEATURE (4)..(4): X is L, R, or W
  MISC_FEATURE (5)..(5): X is K, R, or E
  MISC_FEATURE (6)..(6): X is Q, I, T or E
  MISC_FEATURE (8)..(8): X is Q, K or E
  MISC_FEATURE (9)..(9): X is R, D, K or E
  MISC_FEATURE (11)..(11): X is V or A
  MISC_FEATURE (12)..(12): X is K, E or R
  MISC_FEATURE (13)..(13): X is K, E, S or Q
  MISC_FEATURE (15)..(15): X is K or E
  MISC_FEATURE (16)..(16): X is K, R or E
  MISC_FEATURE (17)..(17): X is L, K, R or D
  MISC_FEATURE (19)..(19): X is E, K, R or D
  MISC_FEATURE (20)..(20): X is E, K, or R
  MISC_FEATURE (22)..(22): X is Q, D, K, or R
  MISC_FEATURE (23)..(23): X is N or D
  MISC_FEATURE (25)..(25): X is K, E or S
  MISC_FEATURE (26)..(26): X is K or E
  MISC_FEATURE (29)..(29): X is K or E
  MISC_FEATURE (30)..(30): X is R, H, K or E
  MISC_FEATURE (32)..(32): X is R, K or E
  MISC_FEATURE (33)..(33): X is K or E
  MISC_FEATURE (34)..(34): X is R or A
  MISC_FEATURE (36)..(36): X is R, K or E
  MISC_FEATURE (37)..(37): X is T, R, K or E
  MISC_FEATURE (38)..(38): X is V or A
  MISC_FEATURE (39)..(39): X is K, E, R, or L
  MISC_FEATURE (40)..(40): X is K, E, or N
  MISC_FEATURE (41)..(41): X is L, Q or A
  MISC_FEATURE (42)..(42): X is D or A
  MISC_FEATURE (43)..(43): X is R, K, or E
  MISC_FEATURE (44)..(44): X is S, E, Q or R
  MISC_FEATURE (45)..(45): X is T or Q
XXAXXXAXXAXXXAXXXAXXGXXPXXIAXXLXXXAXXXXXXXXXX

SEQ ID NO: 286 - protein, 47 aa, Artificial Sequence
  Synthetic
SSVAEEIEKRAKKISKELKKEGKNPEWIEELQRAADKLVEVARRATS

SEQ ID NO: 287 - protein, 46 aa, Artificial Sequence
  Synthetic
SDALEIAKRAVKIAEELAKQGSNPKWIAELLKAAAKLVEVAARATS

SEQ ID NO: 288 - protein, 45 aa, Artificial Sequence
  Synthetic
PKALKQAKEAVKEAEELAKKGRNPKEIAEELKKRAKEVEKLARST

SEQ ID NO: 289 - protein, 48 aa, Artificial Sequence
  Synthetic
  MISC_FEATURE (1)..(1): X is S, or D
  MISC_FEATURE (2)..(2): X is T, N or D
  MISC_FEATURE (3)..(3): X is E or D
  MISC_FEATURE (4)..(4): X is E, K or D
  MISC_FEATURE (6)..(6): X is E, K or R
  MISC_FEATURE (7)..(7): X is K or Q
  MISC_FEATURE (9)..(9): X is L, I, Y or K
  MISC_FEATURE (10)..(10): X is E, R, or K
  MISC_FEATURE (11)..(11): X is D, T, R, or K
  MISC_FEATURE (13)..(13): X is E, Q, R, or K
  MISC_FEATURE (14)..(14): X is E, R, or H
  MISC_FEATURE (15)..(15): X is L, A or D
  MISC_FEATURE (16)..(16): X is S or A
  MISC_FEATURE (17)..(17): X is E, K, R or D
  MISC_FEATURE (18)..(18): X is E, R or Q
  MISC_FEATURE (20)..(20): X is E, R, K or N
  MISC_FEATURE (21)..(21): X is E or K
  MISC_FEATURE (22)..(22): X is S, V, I or E
  MISC_FEATURE (23)..(23): X is T, D, or S
  MISC_FEATURE (24)..(24): X is D or N
  MISC_FEATURE (25)..(25): X is P or T
  MISC_FEATURE (26)..(26): X is E, D, N or T
  MISC_FEATURE (27)..(27): X is E, D, N or K
  MISC_FEATURE (29)..(29): X is L, A, K or R
  MISC_FEATURE (30)..(30): X is K or E
  MISC_FEATURE (31)..(31): X is I, L or V
  MISC_FEATURE (33)..(33): X is K or E
  MISC_FEATURE (34)..(34): X is K, R or E
  MISC_FEATURE (35)..(35): X is V or A
  MISC_FEATURE (36)..(36): X is V or I
  MISC_FEATURE (37)..(37): X is K, E, or R
  MISC_FEATURE (38)..(38): X is L or E
  MISC_FEATURE (40)..(40): X is L, A, K or E
  MISC_FEATURE (41)..(41): X is Q, K or E
  MISC_FEATURE (43)..(43): X is V or A
  MISC_FEATURE (44)..(44): X is K, R, E or D
  MISC_FEATURE (45)..(45): X is K or E
  MISC_FEATURE (46)..(46): X is D, N or K
XXXXLXXVXXXVXXXXXXAXXXXXXXXAXXXAXXXXXXAXXAXXXXPS

SEQ ID NO: 290 - protein, 47 aa, Artificial Sequence
  Synthetic
  MISC_FEATURE (1)..(1): X is T, D or E
  MISC_FEATURE (2)..(2): X is T, D, N or L
  MISC_FEATURE (5)..(5): X is R, E, K, or Q
  MISC_FEATURE (8)..(8): X is L, Y, A, or E
  MISC_FEATURE (9)..(9): X is L, K, R, or E
  MISC_FEATURE (12)..(12): X is Q, K, R, or E
  MISC_FEATURE (15)..(15): X is S or A
  MISC_FEATURE (16)..(16): X is E or R
  MISC_FEATURE (17)..(17): X is V or A
  MISC_FEATURE (19)..(19): X is K, Q, E, or R
  MISC_FEATURE (20)..(20): X is K or R
  MISC_FEATURE (21)..(21): X is V, I or L
  MISC_FEATURE (22)..(22): X is T or N
  MISC_FEATURE (23)..(23): X is D or N
  MISC_FEATURE (25)..(25): X is D or E
  MISC_FEATURE (26)..(26): X is K, A or L
  MISC_FEATURE (28)..(28): X is R, K, A or L
  MISC_FEATURE (29)..(29): X is K or E
  MISC_FEATURE (30)..(30): X is I, L or V
  MISC_FEATURE (32)..(32): X is K, E or R
  MISC_FEATURE (33)..(33): X is K, L or W
  MISC_FEATURE (34)..(34): X is V or A
  MISC_FEATURE (35)..(35): X is V or I
  MISC_FEATURE (36)..(36): X is E, K or R
  MISC_FEATURE (39)..(39): X is E, L, A or K
  MISC_FEATURE (40)..(40): X is E, L, D or K
  MISC_FEATURE (42)..(42): X is V or A
  MISC_FEATURE (43)..(43): X is K, E, N or R
  MISC_FEATURE (44)..(44): X is N, E, Q or R
  MISC_FEATURE (45)..(45): X is N or D
XXALXAVXXAVXLAXXXAXXXXXPXXAXXXAXXXXXLAXXAXXXXPS

SEQ ID NO: 291 - protein, 46 aa, Artificial Sequence
  Synthetic
  MISC_FEATURE (1)..(1): X is E, D, K or Q
  MISC_FEATURE (2)..(2): X is E, D, T or L
  MISC_FEATURE (4)..(4): X is K, L or A
  MISC_FEATURE (5)..(5): X is K, R or E
  MISC_FEATURE (8)..(8): X is K or E
  MISC_FEATURE (9)..(9): X is K, L, R or E
  MISC_FEATURE (11)..(11): X is K, I, A or E
  MISC_FEATURE (12)..(12): X is K, D, R or E
  MISC_FEATURE (15)..(15): X is K, Q, R or E
  MISC_FEATURE (16)..(16): X is K, Q, R or E
  MISC_FEATURE (17)..(17): X is V or A
  MISC_FEATURE (18)..(18): X is S or A
  MISC_FEATURE (19)..(19): X is K, Q, E, or R
  MISC_FEATURE (20)..(20): X is K, Q, N, or R
  MISC_FEATURE (21)..(21): X is V, I or L
  MISC_FEATURE (22)..(22): X is T or D
  MISC_FEATURE (24)..(24): X is P, S or D
  MISC_FEATURE (25)..(25): X is E, N, K or D
  MISC_FEATURE (26)..(26): X is L, N, K or S
  MISC_FEATURE (27)..(27): X is A, R or S
  MISC_FEATURE (28)..(28): X is K, E, R or N
  MISC_FEATURE (29)..(29): X is K, E, or R
  MISC_FEATURE (30)..(30): X is I, L or V
  MISC_FEATURE (31)..(31): X is R, K, or E
  MISC_FEATURE (32)..(32): X is R, K, Q or E
  MISC_FEATURE (33)..(33): X is L, K, W or E
  MISC_FEATURE (34)..(34): X is V, A or K
  MISC_FEATURE (35)..(35): X is E, R or K
  MISC_FEATURE (36)..(36): X is E, R, D or K
  MISC_FEATURE (38)..(38): X is E, R, Q or K
  MISC_FEATURE (39)..(39): X is E, R, or K
  MISC_FEATURE (40)..(40): X is E, R, D or L
  MISC_FEATURE (42)..(42): X is Q, K, E or N
  MISC_FEATURE (43)..(43): X is K, E or R
  MISC_FEATURE (44)..(44): X is H, Q, E or R
  MISC_FEATURE (45)..(45): X is D, N or Y
XXAXXAVXXAXXLAXXXXXXXXDXXXXXXXXXXXXXLXXXAXXXXP

SEQ ID NO: 292 - protein, 48 aa, Artificial Sequence
  Synthetic
STEELKKVLERVRELSERAKESTDPEEALKIAKEVIELALKAVKEDPS

SEQ ID NO: 293 - protein, 47 aa, Artificial Sequence
  Synthetic
TDALRAVLEAVRLASEVAKRVTDPDKALKIAKLVIELALEAVKEDPS

SEQ ID NO: 294 - protein, 46 aa, Artificial Sequence
  Synthetic
EEAKRAVEEAKRLAEEVSKRVTDPELSEKIRQLVKELEEEAQKEDP

SEQ ID NO: 295 - protein, 49 aa, Artificial Sequence
  Synthetic
  MISC_FEATURE (1)..(1): X is K or N
  MISC_FEATURE (2)..(2): X is T or S
  MISC_FEATURE (3)..(3): X is K, E, or T
  MISC_FEATURE (5)..(5): X is K, E, D or R
  MISC_FEATURE (6)..(6): X is K, E, or D
  MISC_FEATURE (7)..(7): X is K, E, Q or T
  MISC_FEATURE (9)..(9): X is K, E, or R
  MISC_FEATURE (10)..(10): X is K, E, or R
  MISC_FEATURE (11)..(11): X is V or A
  MISC_FEATURE (12)..(12): X is I, K or R
  MISC_FEATURE (13)..(13): X is K or E
  MISC_FEATURE (14)..(14): X is K, R, N or E
  MISC_FEATURE (16)..(16): X is K, D or E
  MISC_FEATURE (17)..(17): X is K, R, N or E
  MISC_FEATURE (18)..(18): X is L or V
  MISC_FEATURE (19)..(19): X is A, R, E or V
  MISC_FEATURE (20)..(20): X is R, E or K
  MISC_FEATURE (21)..(21): X is N,D, E or K
  MISC_FEATURE (22)..(22): X is L, I or A
  MISC_FEATURE (23)..(23): X is D, K, P or R
  MISC_FEATURE (25)..(25): X is D, K, Q or E
  MISC_FEATURE (26)..(26): X is T, V, L or E
  MISC_FEATURE (28)..(28): X is K or E
  MISC_FEATURE (29)..(29): X is K,D, Q, or R
  MISC_FEATURE (31)..(31): X is V or A
  MISC_FEATURE (32)..(32): X is E or K
  MISC_FEATURE (33)..(33): X is R, E, A, or Q
  MISC_FEATURE (34)..(34): X is I or V
  MISC_FEATURE (35)..(35): X is K or R
  MISC_FEATURE (36)..(36): X is K, E or R
  MISC_FEATURE (39)..(39): X is K or E
  MISC_FEATURE (40)..(40): X is A or E
  MISC_FEATURE (42)..(42): X is K, R, I or E
  MISC_FEATURE (43)..(43): X is K, R, Q or E
  MISC_FEATURE (46)..(46): X is K, R, D or E
  MISC_FEATURE (47)..(47): X is Q, S, or N
  MISC_FEATURE (49)..(49): X is K or N
XXXVXXXAXXXXXXAXXXXXXXXSXXAXXVXXXXXXAAXXAXXAAXXGX

SEQ ID NO: 296 - protein, 48 aa, Artificial Sequence
  Synthetic
  MISC_FEATURE (1)..(1): X isT or S
  MISC_FEATURE (2)..(2): X is E or R
  MISC_FEATURE (5)..(5): X is E or K
  MISC_FEATURE (6)..(6): X is L, R or K
  MISC_FEATURE (9)..(9): X is E or K
  MISC_FEATURE (10)..(10): X is V or A
  MISC_FEATURE (12)..(12): X is K, E or T
  MISC_FEATURE (13)..(13): X is R, E or Q
  MISC_FEATURE (16)..(16): X is R, E or K
  MISC_FEATURE (17)..(17): X is L or V
  MISC_FEATURE (19)..(19): X is K, E, Q, or R
  MISC_FEATURE (20)..(20): X is K, E, or N
  MISC_FEATURE (21)..(21): X is L, A, I or N
  MISC_FEATURE (22)..(22): X is R, D, K or P
  MISC_FEATURE (24)..(24): X is D, K or E
  MISC_FEATURE (25)..(25): X is T, Q, K or E
  MISC_FEATURE (28)..(28): X is K or E
  MISC_FEATURE (30)..(30): X is V or A
  MISC_FEATURE (31)..(31): X is L or A
  MISC_FEATURE (32)..(32): X is E, Q or A
  MISC_FEATURE (33)..(33): X is I or V
  MISC_FEATURE (35)..(35): X is R, E, or K
  MISC_FEATURE (38)..(38): X is L, A, K or E
  MISC_FEATURE (39)..(39): X is A or E
  MISC_FEATURE (42)..(42): X is Q, R or E
  MISC_FEATURE (45)..(45): X is K, Q, R or E
  MISC_FEATURE (46)..(46): X is S, Q, E or E
  MISC_FEATURE (48)..(48): X is K or N
XXVAXXALXXLXXAIXXAXXXXSXXALXVXXXXAXAAXXAAXAAXXGX

SEQ ID NO: 297 - protein, 47 aa, Artificial Sequence
  Synthetic
  MISC_FEATURE (1)..(1): X is S or T
  MISC_FEATURE (2)..(2): X is D, E,or R
  MISC_FEATURE (3)..(3): X is E or V
  MISC_FEATURE (5)..(5): X is E, R or K
  MISC_FEATURE (6)..(6): X is E, R, D or K
  MISC_FEATURE (9)..(9): X is E, R, D or K
  MISC_FEATURE (10)..(10): X is E, R, or K
  MISC_FEATURE (12)..(12): X is E, Q, T, or K
  MISC_FEATURE (13)..(13): X is E, Q, R, or K
  MISC_FEATURE (16)..(16): X is E, R, or K
  MISC_FEATURE (17)..(17): X is E, H, T or D
  MISC_FEATURE (19)..(19): X is E, K, Q, or R
  MISC_FEATURE (20)..(20): X is E, K, Q, or R
  MISC_FEATURE (21)..(21): X is N, D, H or R
  MISC_FEATURE (22)..(22): X is K, R, D, or P
  MISC_FEATURE (24)..(24): X is K, D, or E
  MISC_FEATURE (25)..(25): X is D or E
  MISC_FEATURE (25)..(25): X is S, D or E
  MISC_FEATURE (26)..(26): X is S or A
  MISC_FEATURE (28)..(28): X is E, K, N or Q
  MISC_FEATURE (29)..(29): X is E or K
  MISC_FEATURE (30)..(30): X is V or A
  MISC_FEATURE (31)..(31): X is R, L, K or Y
  MISC_FEATURE (32)..(32): X is E, D or K
  MISC_FEATURE (33)..(33): X is E, R, I or W
  MISC_FEATURE (35)..(35): X is E, R, or K
  MISC_FEATURE (36)..(36): X is E, N, Q, or K
  MISC_FEATURE (38)..(38): X is E, R, A, or K
  MISC_FEATURE (39)..(39): X is E, Q, or K
  MISC_FEATURE (40)..(40): X is E, Q, D or K
  MISC_FEATURE (42)..(42): X is E, D or R
  MISC_FEATURE (43)..(43): X is K, N, D or R
  MISC_FEATURE (45)..(45): X is K, S, D or R
  MISC_FEATURE (46)..(46): X is E, N or R
XXXAXXALXXLXXAIXXAXXXXSXXXLXXXXXXAXXAXXXAXXAXXG

SEQ ID NO: 298 - protein, 49 aa, Artificial Sequence
  Synthetic
KTEVEKKAKEVIKEAKELAKELDSEEAKKVVERIKEAAEAAKRAAEQGK

SEQ ID NO: 299 - protein, 48 aa, Artificial Sequence
  Synthetic
TEVAKLALKVLEEAIELAKENRSEEALKVVLEIARAALAAAQAAEEGK

SEQ ID NO: 300 - protein, 47 aa, Artificial Sequence
  Synthetic
SDEARDALRRLEEAIEEAKENRSKESLEKVREEAKEAEQQAEDAREG

SEQ ID NO: 301 - protein, 34 aa, Artificial Sequence
  Synthetic
  MISC_FEATURE (1)..(1): X is T, N, or D
  MISC_FEATURE (2)..(2): X is T, S, or D
  MISC_FEATURE (3)..(3): X is T or I
  MISC_FEATURE (4)..(4): X is K, S, R or Q
  MISC_FEATURE (5)..(5): X is K, D or E
  MISC_FEATURE (6)..(6): X is K, D or E
  MISC_FEATURE (8)..(8): X is K, D, N or E
  MISC_FEATURE (9)..(9): X is K, R or E
  MISC_FEATURE (10)..(10): X is I, V or A
  MISC_FEATURE (11)..(11): X is I or K
  MISC_FEATURE (13)..(13): X is E, R or D
  MISC_FEATURE (15)..(15): X is E, K or Q
  MISC_FEATURE (17)..(17): X is E, T, N or Q
  MISC_FEATURE (20)..(20): X is E, D, R, or S
  MISC_FEATURE (21)..(21): X is E, D, T, or K
  MISC_FEATURE (23)..(23): X is I or K
  MISC_FEATURE (24)..(24): X is R, E or K
  MISC_FEATURE (25)..(25): X is L, A or T
  MISC_FEATURE (27)..(27): X is Q, E, R or K
  MISC_FEATURE (28)..(28): X is E, R or K
  MISC_FEATURE (30)..(30): X is A or K
  MISC_FEATURE (31)..(31): X is E, R, N or K
  MISC_FEATURE (32)..(32): X is E, R, Q or K
  MISC_FEATURE (34)..(34): X is T, N, or D
XXXXXXAXXXXKXAXKXGSXXAXXXAXXAXXXGX

SEQ ID NO: 302 - protein, 33 aa, Artificial Sequence
  Synthetic
  MISC_FEATURE (1)..(1): X is D, E, K or P
  MISC_FEATURE (2)..(2): X is I or T
  MISC_FEATURE (3)..(3): X is L or A
  MISC_FEATURE (4)..(4): X is V or A
  MISC_FEATURE (5)..(5): X is R, K, E, or D
  MISC_FEATURE (8)..(8): X is R, K, E, or Q
  MISC_FEATURE (9)..(9): X is I, V or A
  MISC_FEATURE (10)..(10): X is I or V
  MISC_FEATURE (11)..(11): X is A, I or V
  MISC_FEATURE (12)..(12): X is R or E
  MISC_FEATURE (15)..(15): X is R, Q, K or E
  MISC_FEATURE (16)..(16): X is T, Q, S or E
  MISC_FEATURE (19)..(19): X is R, D, S or E
  MISC_FEATURE (20)..(20): X is D, T or A
  MISC_FEATURE (23)..(23): X is R, E, or K
  MISC_FEATURE (24)..(24): X is L, A, or T
  MISC_FEATURE (26)..(26): X is K, R, E, or A
  MISC_FEATURE (27)..(27): X is K, R, E, or Q
  MISC_FEATURE (29)..(29): X is S or A
  MISC_FEATURE (30)..(30): X is R or E
  MISC_FEATURE (31)..(31): X is Q, K, R or E
  MISC_FEATURE (33)..(33): X is T, N, or D
XXXXXAAXXXXXAQXXGSXXAIXXAXXAXXXGX

SEQ ID NO: 303 - protein, 32 aa, Artificial Sequence
  Synthetic
  MISC_FEATURE (1)..(1): X is P, E, Q or R
  MISC_FEATURE (2)..(2): X is T, I, K or R
  MISC_FEATURE (3)..(3): X is L or A
  MISC_FEATURE (4)..(4): X is V or A
  MISC_FEATURE (5)..(5): X is K, E or R
  MISC_FEATURE (8)..(8): X is K, E, Q or R
  MISC_FEATURE (9)..(9): X is K, E, or R
  MISC_FEATURE (10)..(10): X is V or I
  MISC_FEATURE (11)..(11): X is V, A or I
  MISC_FEATURE (12)..(12): X is R, E, D or K
  MISC_FEATURE (14)..(14): X is Q, E, or T
  MISC_FEATURE (15)..(15): X is Q, E, K or R
  MISC_FEATURE (16)..(16): X is K or E
  MISC_FEATURE (19)..(19): X is Q, D, E, or R
  MISC_FEATURE (20)..(20): X is D or E
  MISC_FEATURE (21)..(21): X is T, S, or K
  MISC_FEATURE (22)..(22): X is I or K
  MISC_FEATURE (23)..(23): X is E, R or K
  MISC_FEATURE (24)..(24): X is Q, R or K
  MISC_FEATURE (26)..(26): X is E, N, R or K
  MISC_FEATURE (27)..(27): X is E, R or K
  MISC_FEATURE (28)..(28): X is E, A, D or K
  MISC_FEATURE (29)..(29): X is S or A
  MISC_FEATURE (30)..(30): X is R, E, or K
  MISC_FEATURE (31)..(31): X is R, E, Q or K
XXXXXAAXXXXXAXXXGSXXXXXXAXXXXXXG

SEQ ID NO: 304 - protein, 34 aa, Artificial Sequence
  Synthetic
TDIKKKAEEIIKEAKKQGSEDAIRLAQEAKKQGT

SEQ ID NO: 305 - protein, 33 aa, Artificial Sequence
  Synthetic
DILVRAAEIVVRAQEQGSEDAIRLAKEASREGT

SEQ ID NO: 306 - protein, 32 aa, Artificial Sequence
  Synthetic
PTLVKAAEKVVRAQQKGSQDTIEKAKEESREG

SEQ ID NO: 307 - protein, 44 aa, Artificial Sequence
  Synthetic
  MISC_FEATURE (1)..(1): X is D, S, or N
  MISC_FEATURE (2)..(2): X is T or N
  MISC_FEATURE (3)..(3): X is D, E, or R
  MISC_FEATURE (4)..(4): X is D or E
  MISC_FEATURE (5)..(5): X is K or L
  MISC_FEATURE (6)..(6): X is K, R or E
  MISC_FEATURE (7)..(7): X is K, Q or E
  MISC_FEATURE (8)..(8): X is K, R or E
  MISC_FEATURE (10)..(10): X is Q, K, R or E
  MISC_FEATURE (11)..(11): X is D, K, R or E
  MISC_FEATURE (13)..(13): X is L or I
  MISC_FEATURE (14)..(14): X is Q, K, E, or R
  MISC_FEATURE (15)..(15): X is N, K, E, or R
  MISC_FEATURE (17)..(17): X is Q, K, E, or D
  MISC_FEATURE (18)..(18): X is Q, K, or E
  MISC_FEATURE (20)..(20): X is Q, R, I, or E
  MISC_FEATURE (21)..(21): X is K or R
  MISC_FEATURE (22)..(22): X is K, E, D or R
  MISC_FEATURE (24)..(24): X is D or N
  MISC_FEATURE (25)..(25): X is V or A
  MISC_FEATURE (26)..(26): X is E, K, D or R
  MISC_FEATURE (27)..(27): X is E, K, S or R
  MISC_FEATURE (29)..(29): X is V or A
  MISC_FEATURE (30)..(30): X is R, K, or E
  MISC_FEATURE (32)..(32): X is A or L
  MISC_FEATURE (33)..(33): X is Q, E, or K
  MISC_FEATURE (34)..(34): X is E or R
  MISC_FEATURE (36)..(36): X is V or A
  MISC_FEATURE (37)..(37): X is R, E, K or Q
  MISC_FEATURE (40)..(40): X is R, T, or K
  MISC_FEATURE (41)..(41): X is R, E, or K
  MISC_FEATURE (42)..(42): X is A or S
  MISC_FEATURE (44)..(44): X is D, N or S
XXXXXXXXAXXAXXXAXXAXXXGXXXXAXXAXXXAXXAAXXXGX

SEQ ID NO: 308 - protein, 43 aa, Artificial Sequence
  Synthetic
  MISC_FEATURE (1)..(1): X is N, Q, T, or K
  MISC_FEATURE (2)..(2): X is D or E
  MISC_FEATURE (3)..(3): X is V, L or A
  MISC_FEATURE (5)..(5): X is R, K or E
  MISC_FEATURE (6)..(6): X is R, K, Q or E
  MISC_FEATURE (7)..(7): X is V or A
  MISC_FEATURE (9)..(9): X is E or R
  MISC_FEATURE (10)..(10): X is Q, V, A or E
  MISC_FEATURE (12)..(12): X is L or E
  MISC_FEATURE (13)..(13): X is K, Q, or R
  MISC_FEATURE (14)..(14): X is I, A or V
  MISC_FEATURE (16)..(16): X is K, E, Q or D
  MISC_FEATURE (17)..(17): X is E, Q or L
  MISC_FEATURE (19)..(19): X is E, Q or R
  MISC_FEATURE (20)..(20): X is E, K or R
  MISC_FEATURE (21)..(21): X is E, Q or D
  MISC_FEATURE (23)..(23): X is N or D
  MISC_FEATURE (24)..(24): X is V or A
  MISC_FEATURE (25)..(25): X is E, Q, K or R
  MISC_FEATURE (26)..(26): X is V, A, or L
  MISC_FEATURE (28)..(28): X is V or A
  MISC_FEATURE (29)..(29): X is K, E, D, or R
  MISC_FEATURE (31)..(31): X is A or L
  MISC_FEATURE (32)..(32): X is R, K or E
  MISC_FEATURE (33)..(33): X is V or I
  MISC_FEATURE (35)..(35): X is V or A
  MISC_FEATURE (36)..(36): X is E, R, or D
  MISC_FEATURE (39)..(39): X is E, R, K or S
  MISC_FEATURE (40)..(40): X is Q, E, or N
  MISC_FEATURE (43)..(43): X is D or S
XXXLXXXAXXAXXXAXXAXXXGXXXXAXXAXXXAXXAAXXAGX

SEQ ID NO: 309 - protein, 42 aa, Artificial Sequence
  Synthetic
  MISC_FEATURE (1)..(1): X is Q, K or T
  MISC_FEATURE (2)..(2): X is D, E, or S
  MISC_FEATURE (3)..(3): X is V, L, A, or S
  MISC_FEATURE (5)..(5): X is R, E, H or K
  MISC_FEATURE (6)..(6): X is R, E, or K
  MISC_FEATURE (7)..(7): X is V or A
  MISC_FEATURE (8)..(8): X is S or A
  MISC_FEATURE (9)..(9): X is E, R, or Q
  MISC_FEATURE (10)..(10): X is E, V, A, or Q
  MISC_FEATURE (12)..(12): X is E, K, R, or Q
  MISC_FEATURE (13)..(13): X is E, K, R, or Q
  MISC_FEATURE (14)..(14): X is I, A or V
  MISC_FEATURE (15)..(15): X is  A or S
  MISC_FEATURE (16)..(16): X is K or E
  MISC_FEATURE (17)..(17): X is Q, D, L or E
  MISC_FEATURE (19)..(19): X is K, R or E
  MISC_FEATURE (20)..(20): X is K or R
  MISC_FEATURE (21)..(21): X is Q, E, or D
  MISC_FEATURE (23)..(23): X is N or D
  MISC_FEATURE (24)..(24): X is S, E, K or D
  MISC_FEATURE (25)..(25): X is E, Q or D
  MISC_FEATURE (26)..(26): X is V, A, or L
  MISC_FEATURE (27)..(27): X is A or S
  MISC_FEATURE (28)..(28): X is E, K, R, or D
  MISC_FEATURE (29)..(29): X is E, K, or Q
  MISC_FEATURE (31)..(31): X is E, K, R or Q
  MISC_FEATURE (32)..(32): X is E, K, or Q
  MISC_FEATURE (33)..(33): X is V or I
  MISC_FEATURE (35)..(35): X is D, K, N or R
  MISC_FEATURE (36)..(36): X is E, K, H or R
  MISC_FEATURE (38)..(38): X is K, A or L
  MISC_FEATURE (39)..(39): X is K, R or T
  MISC_FEATURE (40)..(40): X is Q, E or N
  MISC_FEATURE (41)..(41): X is T or A
XXXLXXXXXXAXXXXXXAXXXGXXXXXXXAXXXAXXAXXXXG

SEQ ID NO: 310 - protein, 44 aa, Artificial Sequence
  Synthetic
DNDEKRKRAEKALQRAQEAEKKGDVEEAVRAAQEAVRAAKESGD

SEQ ID NO: 311 - protein, 43 aa, Artificial Sequence
  Synthetic
NDVLRKVAEQALRIAKEAEKQGNVEVAVKAARVAVEAAKQAGD

SEQ ID NO: 312 - protein, 42 aa, Artificial Sequence
  Synthetic
QDVLRKVSEQAERISKEAKKQGNSEVSEEARKVADEAKKQTG

SEQ ID NO: 313 - protein, 55 aa, Artificial Sequence
  Synthetic
  MISC_FEATURE (1)..(1): X is D or N
  MISC_FEATURE (2)..(2): X is P, S, T or N
  MISC_FEATURE (3)..(3): X is D or E
  MISC_FEATURE (4)..(4): X is D, K or E
  MISC_FEATURE (5)..(5): X is D or A
  MISC_FEATURE (6)..(6): X is R, E, K or A
  MISC_FEATURE (7)..(7): X is R,  E, or K
  MISC_FEATURE (8)..(8): X is R,  E, D or K
  MISC_FEATURE (9)..(9): X is L or A
  MISC_FEATURE (10)..(10): X is K, E, R or Q
  MISC_FEATURE (11)..(11): X is K, E, R or Q
  MISC_FEATURE (12)..(12): X is E, A or V
  MISC_FEATURE (13)..(13): X is L, I, A or V
  MISC_FEATURE (14)..(14): X is K, E or R
  MISC_FEATURE (15)..(15): X is K, D, I or L
  MISC_FEATURE (16)..(16): X is I or A
  MISC_FEATURE (17)..(17): X is R, E, or K
  MISC_FEATURE (18)..(18): X is R, E, Q or K
  MISC_FEATURE (20)..(20): X is L, I, A or S
  MISC_FEATURE (21)..(21): X is R, K or E
  MISC_FEATURE (22)..(22): X is D, I, K or E
  MISC_FEATURE (24)..(24): X is R, N, K or E
  MISC_FEATURE (25)..(25): X is T, K or E
  MISC_FEATURE (26)..(26): X is V, T, K or I
  MISC_FEATURE (28)..(28): X is D or N
  MISC_FEATURE (29)..(29): X is P, S or T
  MISC_FEATURE (30)..(30): X is E, D, N or Q
  MISC_FEATURE (31)..(31): X is E, D, T or Q
  MISC_FEATURE (33)..(33): X is K, A, L or R
  MISC_FEATURE (34)..(34): X is K, E or R
  MISC_FEATURE (37)..(37): X is K, E, Q or R
  MISC_FEATURE (38)..(38): X is K, I or E
  MISC_FEATURE (39)..(39): X is V, I or A
  MISC_FEATURE (40)..(40): X is L, K, A or Q
  MISC_FEATURE (41)..(41): X is K, E or R
  MISC_FEATURE (43)..(43): X is I, L or V
  MISC_FEATURE (44)..(44): X is R, E,K or D
  MISC_FEATURE (45)..(45): X is R, K or D
  MISC_FEATURE (46)..(46): X is I or A
  MISC_FEATURE (47)..(47): X is L, R or A
  MISC_FEATURE (48)..(48): X is K, E or Q
  MISC_FEATURE (51)..(51): X is K, E, R or Q
  MISC_FEATURE (52)..(52): X is K, D, R or Q
  MISC_FEATURE (55)..(55): X is D or N
XXXXXXXXXXXXXXXXXXAXXXAXXXPXXXXIXXALXXXXXAXXXXXXLAXXAGX

SEQ ID NO: 314 - protein, 54 aa, Artificial Sequence
  Synthetic
  MISC_FEATURE (2)..(2): X isD, N, E, or K
  MISC_FEATURE (5)..(5): X is R, A, E, or K
  MISC_FEATURE (6)..(6): X is R, H, E, or K
  MISC_FEATURE (7)..(7): X is V, A or I
  MISC_FEATURE (8)..(8): X is L or A
  MISC_FEATURE (9)..(9): X is K, E, R or D
  MISC_FEATURE (10)..(10): X is K, E, or A
  MISC_FEATURE (11)..(11): X is I, V, or A
  MISC_FEATURE (12)..(12): X is N, A, L or E
  MISC_FEATURE (13)..(13): X is K, R or E
  MISC_FEATURE (14)..(14): X is V, A, or L
  MISC_FEATURE (15)..(15): X is A or I
  MISC_FEATURE (16)..(16): X is R, K, E, or Q
  MISC_FEATURE (17)..(17): X is E, D, I or N
  MISC_FEATURE (19)..(19): X is L, I, A, or Q
  MISC_FEATURE (20)..(20): X is R, E or K
  MISC_FEATURE (21)..(21): X is I or A
  MISC_FEATURE (23)..(23): X is K, E, T or Q
  MISC_FEATURE (24)..(24): X is K, E, T or R
  MISC_FEATURE (27)..(27): X is D or N
  MISC_FEATURE (28)..(28): X is P or T
  MISC_FEATURE (29)..(29): X is E, N, K or T
  MISC_FEATURE (32)..(32): X is E, A, K or R
  MISC_FEATURE (33)..(33): X is E, A, K or T
  MISC_FEATURE (36)..(36): X is E, R, K or N
  MISC_FEATURE (38)..(38): X is V, I or A
  MISC_FEATURE (39)..(39): X is L, A, K or Q
  MISC_FEATURE (40)..(40): X is E, T, A or Q
  MISC_FEATURE (42)..(42): X is I, L or V
  MISC_FEATURE (43)..(43): X is R, Q, E, or K
  MISC_FEATURE (45)..(45): X is I or A
  MISC_FEATURE (46)..(46): X is L, R or A
  MISC_FEATURE (47)..(47): X is K, E, Q or D
  MISC_FEATURE (50)..(50): X is K or E
  MISC_FEATURE (51)..(51): X is Q or H
  MISC_FEATURE (54)..(54): X is D or N
PXLAXXXXXXXXXXXXXAXXXAXXVPXXXVIXXALXVXXXAXXAXXXLAXXAGX

SEQ ID NO: 315 - protein, 53 aa, Artificial Sequence
  Synthetic
  MISC_FEATURE (2)..(2): X is D, E, N or K
  MISC_FEATURE (5)..(5): X is E, R or K
  MISC_FEATURE (6)..(6): X is E, R or K
  MISC_FEATURE (7)..(7): X is A, I or V
  MISC_FEATURE (8)..(8): X is A, R or L
  MISC_FEATURE (9)..(9): X is E, R or K
  MISC_FEATURE (10)..(10): X is E, A, Q or K
  MISC_FEATURE (11)..(11): X is I, A, or V
  MISC_FEATURE (12)..(12): X is D, K or E
  MISC_FEATURE (13)..(13): X is R, K or E
  MISC_FEATURE (14)..(14): X is V, A, or L
  MISC_FEATURE (15)..(15): X is I, A, or R
  MISC_FEATURE (16)..(16): X is D, K, E or R
  MISC_FEATURE (17)..(17): X is E, I, V or N
  MISC_FEATURE (19)..(19): X is Q, E, S,or K
  MISC_FEATURE (20)..(20): X is R, E, N or K
  MISC_FEATURE (21)..(21): X is I or A
  MISC_FEATURE (22)..(22): X is S, K, E or A
  MISC_FEATURE (23)..(23): X is N, K, E or R
  MISC_FEATURE (24)..(24): X is T, K, E or R
  MISC_FEATURE (27)..(27): X is D or N
  MISC_FEATURE (28)..(28): X is E, P or S
  MISC_FEATURE (29)..(29): X is E, N, T or K
  MISC_FEATURE (32)..(32): X is E, R, Q or K
  MISC_FEATURE (33)..(33): X is E, Q or A
  MISC_FEATURE (35)..(35): X is E, Q, K or R
  MISC_FEATURE (36)..(36): X is E, K or R
  MISC_FEATURE (38)..(38): X is I, A, or V
  MISC_FEATURE (39)..(39): X is K, E, D, or R
  MISC_FEATURE (40)..(40): X is K, E, I, or Q
  MISC_FEATURE (42)..(42): X is K, D, E, or Q
  MISC_FEATURE (43)..(43): X is K, R, E, or Q
  MISC_FEATURE (45)..(45): X is R, A, K or I
  MISC_FEATURE (46)..(46): X is K, E or T
  MISC_FEATURE (47)..(47): X is K, E or R
  MISC_FEATURE (49)..(49): X is K, S, E or A
  MISC_FEATURE (50)..(50): X is K, E or Q
  MISC_FEATURE (51)..(51): X is Q or H
  MISC_FEATURE (52)..(52): X is S or A
PXLAXXXXXXXXXXXXXAXXXXXXVPXXXVQXXAXXVXXXAXXAXXXLXXXXG

SEQ ID NO: 316 - protein, 55 aa, Artificial Sequence
  Synthetic
DPDEDRERLKEELKKIREALREAKEKPDPEEIKRALREVLEAIRRILKLAERAGD

SEQ ID NO: 317 - protein, 54 aa, Artificial Sequence
  Synthetic
PDLAREALKEINKVIREALEIAKRVPDPEVIKEALRVVLEAIRAILKLAEQAGD

SEQ ID NO: 318 - protein, 53 aa, Artificial Sequence
  Synthetic
PDLAREALEEIDKVIDEAQEISERVPDEEVQREAQEVIKEADRARKKLSEQSG

SEQ ID NO: 319 - protein, 58 aa, Artificial Sequence
  Synthetic
  MISC_FEATURE (1)..(1): X is D or S
  MISC_FEATURE (2)..(2): X is P or S
  MISC_FEATURE (3)..(3): X is E, D or K
  MISC_FEATURE (5)..(5): X is E, T or K
  MISC_FEATURE (6)..(6): X is L or V
  MISC_FEATURE (7)..(7): X is K, E or R
  MISC_FEATURE (8)..(8): X is K or R
  MISC_FEATURE (9)..(9): X is V or A
  MISC_FEATURE (10)..(10): X is E, K or R
  MISC_FEATURE (11)..(11): X is E or K
  MISC_FEATURE (12)..(12): X is L, I, T or E
  MISC_FEATURE (14)..(14): X is K, R, D or E
  MISC_FEATURE (15)..(15): X is K, E, Q, or T
  MISC_FEATURE (17)..(17): X is K, E, Q, or D
  MISC_FEATURE (18)..(18): X is K, E, or Q
  MISC_FEATURE (19)..(19): X is L, A, K or D
  MISC_FEATURE (20)..(20): X is L or R
  MISC_FEATURE (21)..(21): X is K, Q, E or R
  MISC_FEATURE (22)..(22): X is K, Q, E or D
  MISC_FEATURE (24)..(24): X is K, Q, or N
  MISC_FEATURE (25)..(25): X is K, E, or R
  MISC_FEATURE (26)..(26): X is K or E
  MISC_FEATURE (29)..(29): X is K, D or E
  MISC_FEATURE (30)..(30): X is D or E
  MISC_FEATURE (31)..(31): X is D, A or E
  MISC_FEATURE (33)..(33): X is K, D, R or E
  MISC_FEATURE (34)..(34): X is K, R or E
  MISC_FEATURE (36)..(36): X is L, E, A or R
  MISC_FEATURE (37)..(37): X is Q, E, K or R
  MISC_FEATURE (38)..(38): X is T, V or R
  MISC_FEATURE (40)..(40): X is E, A, H or N
  MISC_FEATURE (41)..(41): X is E, K, Q, or R
  MISC_FEATURE (44)..(44): X is E, K, N, or R
  MISC_FEATURE (45)..(45): X is E or R
  MISC_FEATURE (47)..(47): X is E, K or R
  MISC_FEATURE (48)..(48): X is E or K
  MISC_FEATURE (49)..(49): X is V or A
  MISC_FEATURE (50)..(50): X is L, I or A
  MISC_FEATURE (51)..(51): X is E, K, D or H
  MISC_FEATURE (52)..(52): X is E, K, Q or S
  MISC_FEATURE (54)..(54): X is E, K or Q
  MISC_FEATURE (55)..(55): X is E, K or R
  MISC_FEATURE (56)..(56): X is E, Q, N or D
  MISC_FEATURE (58)..(58): X is S or D
XXXDXXXXXXXXVXXAXXXXXXAXXXGSXXXLXXAXXXAXXAAXXAXXXXXXAXXXGX

SEQ ID NO: 320 - protein, 57 aa, Artificial Sequence
  Synthetic
  MISC_FEATURE (1)..(1): X is P or A
  MISC_FEATURE (2)..(2): X is E or Q
  MISC_FEATURE (3)..(3): X is V or A
  MISC_FEATURE (5)..(5): X is V or L
  MISC_FEATURE (6)..(6): X is R, K or E
  MISC_FEATURE (8)..(8): X is V or A
  MISC_FEATURE (9)..(9): X is E or R
  MISC_FEATURE (13)..(13): X is E or R
  MISC_FEATURE (14)..(14): X is V or A
  MISC_FEATURE (16)..(16): X is E, R or K
  MISC_FEATURE (17)..(17): X is L or I
  MISC_FEATURE (20)..(20): X is R, E or K
  MISC_FEATURE (21)..(21): X is I or A
  MISC_FEATURE (23)..(23): X is K, Q, E or N
  MISC_FEATURE (24)..(24): X is Q, E, D or S
  MISC_FEATURE (25)..(25): X is K, E, R or S
  MISC_FEATURE (28)..(28): X is D, E, or R
  MISC_FEATURE (29)..(29): X is D or E
  MISC_FEATURE (32)..(32): X is K, Q, T or E
  MISC_FEATURE (33)..(33): X is K, R or E
  MISC_FEATURE (35)..(35): X is L, A or E
  MISC_FEATURE (36)..(36): X is R, E, K or Q
  MISC_FEATURE (39)..(39): X is E or S
  MISC_FEATURE (40)..(40): X is E or K
  MISC_FEATURE (43)..(43): X is R or K
  MISC_FEATURE (44)..(44): X is L or Q
  MISC_FEATURE (46)..(46): X is K, E or Q
  MISC_FEATURE (47)..(47): X is R, E or D
  MISC_FEATURE (48)..(48): X is V or A
  MISC_FEATURE (49)..(49): X is L, I or A
  MISC_FEATURE (50)..(50): X is E, D, or K
  MISC_FEATURE (53)..(53): X is E, Q, R, or K
  MISC_FEATURE (54)..(54): X is Q, R, or K
  MISC_FEATURE (55)..(55): X is Q or R
XXXAXXAXXLVVXXAXXLLXXAXXXGSXXALXXAXXVAXXAAXXAXXXXXLAXXXGD

SEQ ID NO: 321 - protein, 56 aa, Artificial Sequence
  Synthetic
  MISC_FEATURE (1)..(1): X is P or A
  MISC_FEATURE (2)..(2): X is E, K, R, or D
  MISC_FEATURE (3)..(3): X is V or A
  MISC_FEATURE (5)..(5): X is R, K, E or H
  MISC_FEATURE (6)..(6): X is R, K, E or T
  MISC_FEATURE (8)..(8): X is V or A
  MISC_FEATURE (9)..(9): X is E, R or K
  MISC_FEATURE (12)..(12): X is Q, R or K
  MISC_FEATURE (13)..(13): X is E, R or K
  MISC_FEATURE (14)..(14): X is V or A
  MISC_FEATURE (16)..(16): X is E, K, D, or R
  MISC_FEATURE (17)..(17): X is L or I
  MISC_FEATURE (19)..(19): X is E, K or R
  MISC_FEATURE (20)..(20): X is E, K, Q or R
  MISC_FEATURE (21)..(21): X is I or A
  MISC_FEATURE (23)..(23): X is R, K, E or N
  MISC_FEATURE (24)..(24): X is E, Q, D, or S
  MISC_FEATURE (25)..(25): X is E, S, K, or Q
  MISC_FEATURE (29)..(29): X is E, K, or D
  MISC_FEATURE (32)..(32): X is E or K
  MISC_FEATURE (33)..(33): X is R or K
  MISC_FEATURE (35)..(35): X is E, Q or K
  MISC_FEATURE (36)..(36): X is R, Q or K
  MISC_FEATURE (38)..(38): X is R, E, Q or K
  MISC_FEATURE (39)..(39): X is R, E, D or K
  MISC_FEATURE (40)..(40): X is R, E, Q or K
  MISC_FEATURE (42)..(42): X is R, E, or K
  MISC_FEATURE (43)..(43): X is R, E, or K
  MISC_FEATURE (44)..(44): X is L or E
  MISC_FEATURE (45)..(45): X is Q, K, R or E
  MISC_FEATURE (46)..(46): X is K, N or E
  MISC_FEATURE (47)..(47): X is R, Q or E
  MISC_FEATURE (48)..(48): X is V or A
  MISC_FEATURE (49)..(49): X is K,E or D
  MISC_FEATURE (50)..(50): X is K,E or R
  MISC_FEATURE (52)..(52): X is A or R
  MISC_FEATURE (53)..(53): X is K, E or R
  MISC_FEATURE (54)..(54): X is K or R
  MISC_FEATURE (55)..(55): X is E or Q
XXXAXXAXXLVXXXAXXLXXXAXXXGSEXAKXXAXXVXXXAXXXXXXXXXLXXXXG

SEQ ID NO: 322 - protein, 58 aa, Artificial Sequence
  Synthetic
DPEDELKRVEKLVKEAEELLRQAKEKGSEEDLEKALRTAEEAAREAKKVLEQAEKEGD

SEQ ID NO: 323 - protein, 57 aa, Artificial Sequence
  Synthetic
PEVALRAVELVVRVAELLLRIAKESGSEEALERALRVAEEAARLAKRVLELAEKQGD

SEQ ID NO: 324 - protein, 56 aa, Artificial Sequence
  Synthetic
PEVARRAVELVKRVAELLERIARESGSEEAKERAERVREEARELQERVKELREREG

SEQ ID NO: 325 - protein, 55 aa, Artificial Sequence
  Synthetic
  MISC_FEATURE (2)..(2): X is S, D, N or T
  MISC_FEATURE (3)..(3): X is E, D, N or R
  MISC_FEATURE (4)..(4): X is E, D, or Q
  MISC_FEATURE (5)..(5): X is E, D, or K
  MISC_FEATURE (6)..(6): X is R, I or K
  MISC_FEATURE (7)..(7): X is V or L
  MISC_FEATURE (8)..(8): X is R, K, E or D
  MISC_FEATURE (11)..(11): X is R, K, or E
  MISC_FEATURE (12)..(12): X is Q, D, K, or E
  MISC_FEATURE (14)..(14): X is V or A
  MISC_FEATURE (15)..(15): X is R, E, or D
  MISC_FEATURE (16)..(16): X is R, E, K or Q
  MISC_FEATURE (18)..(18): X is I, E or Q
  MISC_FEATURE (19)..(19): X is  E or K
  MISC_FEATURE (20)..(20): X is R, E or K
  MISC_FEATURE (21)..(21): X is I or A
  MISC_FEATURE (22)..(22): X is Q, K or R
  MISC_FEATURE (23)..(23): X is E, Q, K or R
  MISC_FEATURE (25)..(25): X is L or I
  MISC_FEATURE (27)..(27): X is K, E, D, or N
  MISC_FEATURE (28)..(28): X is K, R, S, or N
  MISC_FEATURE (29)..(29): X is D or P
  MISC_FEATURE (30)..(30): X is T,S or D
  MISC_FEATURE (31)..(31): X is E, P ,S or D
  MISC_FEATURE (32)..(32): X is E, S or D
  MISC_FEATURE (33)..(33): X is A or L
  MISC_FEATURE (34)..(34): X is R, Q, or K
  MISC_FEATURE (35)..(35): X is R, E, N, or K
  MISC_FEATURE (38)..(38): X is E or K
  MISC_FEATURE (40)..(40): X is A or I
  MISC_FEATURE (41)..(41): X is K, Q, E, or R
  MISC_FEATURE (42)..(42): X is K, L, or R
  MISC_FEATURE (44)..(44): X is K, A, L, or R
  MISC_FEATURE (45)..(45): X is K, E, or R
  MISC_FEATURE (47)..(47): X is V or I
  MISC_FEATURE (48)..(48): X is E, K or D
  MISC_FEATURE (49)..(49): X is E, K, R or D
  MISC_FEATURE (51)..(51): X is E, K, S or Q
  MISC_FEATURE (52)..(52): X is E, K, or R
  MISC_FEATURE (53)..(53): X is E, K, Q or R
TXXXXXXXEAXXRXXXAXXXXXXAXKXXXXXXXXXALXAXXXLXXVXXXAXXXGT

SEQ ID NO: 326 - protein, 54 aa, Artificial Sequence
  Synthetic
  MISC_FEATURE (1)..(1): X is S, D, T, or E
  MISC_FEATURE (2)..(2): X is N, D, R, or E
  MISC_FEATURE (4)..(4): X is I, A or L
  MISC_FEATURE (5)..(5): X is K or R
  MISC_FEATURE (6)..(6): X is V or L
  MISC_FEATURE (13)..(13): X is V or A
  MISC_FEATURE (15)..(15): X is E or Q
  MISC_FEATURE (17)..(17): X is A or I
  MISC_FEATURE (19)..(19): X is R, E, or K
  MISC_FEATURE (20)..(20): X is I or A
  MISC_FEATURE (24)..(24): X is I or L
  MISC_FEATURE (25)..(25): X is N, E, K or D
  MISC_FEATURE (26)..(26): X is N, E, K or R
  MISC_FEATURE (27)..(27): X is N, K or R
  MISC_FEATURE (29)..(29): X is T, D, or N
  MISC_FEATURE (30)..(30): X is P or N
  MISC_FEATURE (31)..(31): X is D, E, or S
  MISC_FEATURE (32)..(32): X is A or L
  MISC_FEATURE (34)..(34): X is K, E, D, or R
  MISC_FEATURE (36)..(36): X is L or V
  MISC_FEATURE (37)..(37): X is R or K
  MISC_FEATURE (39)..(39): X is A or I
  MISC_FEATURE (40)..(40): X is V or I
  MISC_FEATURE (41)..(41): X is K, E or L
  MISC_FEATURE (44)..(44): X is K, E or D
  MISC_FEATURE (46)..(46): X is V or I
  MISC_FEATURE (47)..(47): X is Y or A
  MISC_FEATURE (48)..(48): X is K, E, Q, or R
  MISC_FEATURE (51)..(51): X is D, E, Q, or R
  MISC_FEATURE (52)..(52): X is S, R, Q, or D
XXAXXXAEAAARXAXAXAXXLEAXXXXDXXXXRXAXXAXXXLAXVXXXAAXXGT

SEQ ID NO: 327 - protein, 53 aa, Artificial Sequence
  Synthetic
  MISC_FEATURE (1)..(1): X is T, D, E or R
  MISC_FEATURE (2)..(2): X is S, D, E or R
  MISC_FEATURE (4)..(4): X is L, A, or I
  MISC_FEATURE (5)..(5): X is K, E, Q, or R
  MISC_FEATURE (6)..(6): X is V, L or S
  MISC_FEATURE (8)..(8): X is E or K
  MISC_FEATURE (9)..(9): X is E, Q or K
  MISC_FEATURE (12)..(12): X is R, D or K
  MISC_FEATURE (13)..(13): X is V or A
  MISC_FEATURE (16)..(16): X is K, E, S, or T
  MISC_FEATURE (17)..(17): X is I or A
  MISC_FEATURE (19)..(19): X is R, D, or E
  MISC_FEATURE (20)..(20): X is I or A
  MISC_FEATURE (22)..(22): X is E, D, or K
  MISC_FEATURE (23)..(23): X is E, R or K
  MISC_FEATURE (24)..(24): X is L or I
  MISC_FEATURE (25)..(25): X is N, K, E or R
  MISC_FEATURE (26)..(26): X is D, K, E or R
  MISC_FEATURE (27)..(27): X is D, N, H or R
  MISC_FEATURE (28)..(28): X is D or N
  MISC_FEATURE (29)..(29): X is T or S
  MISC_FEATURE (30)..(30): X is P, D, or E
  MISC_FEATURE (31)..(31): X is D or E
  MISC_FEATURE (32)..(32): X is A, L or E
  MISC_FEATURE (33)..(33): X is L or R
  MISC_FEATURE (34)..(34): X is K or Q
  MISC_FEATURE (35)..(35): X is K, E or N
  MISC_FEATURE (36)..(36): X is L or V
  MISC_FEATURE (37)..(37): X is R, E, K or Q
  MISC_FEATURE (38)..(38): X is R, E, D or Q
  MISC_FEATURE (39)..(39): X is A or I
  MISC_FEATURE (40)..(40): X is V or I
  MISC_FEATURE (41)..(41): X is K or R
  MISC_FEATURE (42)..(42): X is K, R, E, or D
  MISC_FEATURE (44)..(44): X is E or R
  MISC_FEATURE (45)..(45): X is K, E or Q
  MISC_FEATURE (46)..(46): X is V or I
  MISC_FEATURE (47)..(47): X is V or Y
  MISC_FEATURE (48)..(48): X is K, Q, E, or R
  MISC_FEATURE (49)..(49): X is K, S, E, or L
  MISC_FEATURE (50)..(50): X is S, E, or A
  MISC_FEATURE (51)..(51): X is E, K, Q, or R
  MISC_FEATURE (52)..(52): X is E, K, Q, or R
XXAXXXAXXAAXXAEXXAXXLXXXXXXXXXXXXXXXXXXXXXAXXXXXXXXXG

SEQ ID NO: 328 - protein, 55 aa, Artificial Sequence
  Synthetic
TSDDDKVREAEERVREAIERIQRALKKRDTPDARKALEAAKKLLKVVEKAKKRGT

SEQ ID NO: 329 - protein, 54 aa, Artificial Sequence
  Synthetic
SDAIKVAEAAARVAEAIARILEALNERDTPDARKALRAAIKLAEVVYKAAESGT

SEQ ID NO: 330 - protein, 53 aa, Artificial Sequence
  Synthetic
TEALKVAEKAARVAEKIARILEKLNERDTPEARKKLRQAIKEAEKVYKESEQG

SEQ ID NO: 331 - protein, 61 aa, Artificial Sequence
  Synthetic
  MISC_FEATURE (1)..(1): X is T, N, or D
  MISC_FEATURE (2)..(2): X is T, S, or D
  MISC_FEATURE (3)..(3): X is E, D, R, or T
  MISC_FEATURE (4)..(4): X is I, L or K
  MISC_FEATURE (5)..(5): X is D, E or K
  MISC_FEATURE (6)..(6): X is E or K
  MISC_FEATURE (8)..(8): X is I, V or K
  MISC_FEATURE (9)..(9): X is E, R or K
  MISC_FEATURE (10)..(10): X is E, R, D or K
  MISC_FEATURE (11)..(11): X is L or V
  MISC_FEATURE (12)..(12): X is R, Q, E, or K
  MISC_FEATURE (13)..(13): X is R, Q, N, or K
  MISC_FEATURE (14)..(14): X is T, E, Q or K
  MISC_FEATURE (16)..(16): X is D or K
  MISC_FEATURE (17)..(17): X is E, Q, R or K
  MISC_FEATURE (18)..(18): X is V or A
  MISC_FEATURE (19)..(19): X is K, I, E or A
  MISC_FEATURE (20)..(20): X is K, E, R or N
  MISC_FEATURE (21)..(21): X is Q, E, R or D
  MISC_FEATURE (23)..(23): X is E or K
  MISC_FEATURE (24)..(24): X is R, E or K
  MISC_FEATURE (25)..(25): X is R, A or L
  MISC_FEATURE (26)..(26): X is K, I, Q, or R
  MISC_FEATURE (27)..(27): X is K or R
  MISC_FEATURE (28)..(28): X is K, E, N or R
  MISC_FEATURE (29)..(29): X is S or A
  MISC_FEATURE (31)..(31): X is D, N or S
  MISC_FEATURE (32)..(32): X is D, P or S
  MISC_FEATURE (33)..(33): X is T, R, D, or N
  MISC_FEATURE (34)..(34): X is V or L
  MISC_FEATURE (35)..(35): X is R or A
  MISC_FEATURE (36)..(36): X is E, K, N or T
  MISC_FEATURE (37)..(37): X is V, I or L
  MISC_FEATURE (39)..(39): X is E, K, H or Q
  MISC_FEATURE (40)..(40): X is E, K, or R
  MISC_FEATURE (41)..(41): X is L, A, or I
  MISC_FEATURE (43)..(43): X is Q, E, K or R
  MISC_FEATURE (44)..(44): X is L or I
  MISC_FEATURE (46)..(46): X is L, K, E or R
  MISC_FEATURE (47)..(47): X is D, K, E or R
  MISC_FEATURE (48)..(48): X is V or I
  MISC_FEATURE (50)..(50): X is E, K, D or R
  MISC_FEATURE (51)..(51): X is E, N, or R
  MISC_FEATURE (54)..(54): X is E, Q, K, or R
  MISC_FEATURE (57)..(57): X is E, Q, K, or R
  MISC_FEATURE (60)..(60): X is T, E, P or Q
  MISC_FEATURE (61)..(61): X is T, N or D
XXXXXXLXXXXXXXAXXXXXXAXXXXXXXTXXXXXXXIXXXAXXAXXXAXXAAXLIXKAXX

SEQ ID NO: 332 - protein, 60 aa, Artificial Sequence
  Synthetic
  MISC_FEATURE (1)..(1): X is T, K, E, or S
  MISC_FEATURE (2)..(2): X is T, K, E, or D
  MISC_FEATURE (3)..(3): X is V, L or I
  MISC_FEATURE (5)..(5): X is K, E or R
  MISC_FEATURE (7)..(7): X is V or I
  MISC_FEATURE (8)..(8): X is W or A
  MISC_FEATURE (9)..(9): X is K, R, E or Q
  MISC_FEATURE (10)..(10): X is L or V
  MISC_FEATURE (12)..(12): X is R, A, K or N
  MISC_FEATURE (13)..(13): X is R, E, K or T
  MISC_FEATURE (15)..(15): X is I or L
  MISC_FEATURE (16)..(16): X is K, E, R or D
  MISC_FEATURE (17)..(17): X is V or A
  MISC_FEATURE (18)..(18): X is V or I
  MISC_FEATURE (19)..(19): X is R, E, A or K
  MISC_FEATURE (20)..(20): X is R, E, or D
  MISC_FEATURE (22)..(22): X is I or A
  MISC_FEATURE (23)..(23): X is E, R, K or Q
  MISC_FEATURE (24)..(24): X is A, R or L
  MISC_FEATURE (25)..(25): X is A, V or I
  MISC_FEATURE (26)..(26): X is E, L, Q or A
  MISC_FEATURE (27)..(27): X is E, K, N or R
  MISC_FEATURE (28)..(28): X is S or A
  MISC_FEATURE (30)..(30): X is D, N, or S
  MISC_FEATURE (31)..(31): X is P, D, S or E
  MISC_FEATURE (32)..(32): X is T, D, N or E
  MISC_FEATURE (33)..(33): X is V or L
  MISC_FEATURE (34)..(34): X is I or A
  MISC_FEATURE (35)..(35): X is R, K or E
  MISC_FEATURE (36)..(36): X is V, I or L
  MISC_FEATURE (38)..(38): X is L or W
  MISC_FEATURE (39)..(39): X is E, K or R
  MISC_FEATURE (40)..(40): X is L, A, or I
  MISC_FEATURE (42)..(42): X is R, K or E
  MISC_FEATURE (46)..(46): X is R, K, S or E
  MISC_FEATURE (47)..(47): X is V or I
  MISC_FEATURE (49)..(49): X is K, I, E or Q
  MISC_FEATURE (50)..(50): X is K, R, E or H
  MISC_FEATURE (53)..(53): X is K, R, or E
  MISC_FEATURE (56)..(56): X is V or A
  MISC_FEATURE (59)..(59): X is T, K or P
  MISC_FEATURE (60)..(60): X is T, D or N
XXXAXLXXXXAXXAXXXXXXAXXXXXXXTXXXXXXXIXXXAXLAAXXAXXAAXLIXKAXX

SEQ ID NO: 333 - protein, 59 aa, Artificial Sequence
  Synthetic
  MISC_FEATURE (1)..(1): X is E, R, K or T
  MISC_FEATURE (2)..(2): X is E, D or N
  MISC_FEATURE (3)..(3): X is V, L or I
  MISC_FEATURE (5)..(5): X is K, R, E or Q
  MISC_FEATURE (6)..(6): X is K or R
  MISC_FEATURE (7)..(7): X is V or I
  MISC_FEATURE (8)..(8): X is W or A
  MISC_FEATURE (9)..(9): X is K, E, R or Q
  MISC_FEATURE (10)..(10): X is K, E, L or T
  MISC_FEATURE (12)..(12): X is K, A, Q or Y
  MISC_FEATURE (13)..(13): X is R, E, K or D
  MISC_FEATURE (15)..(15): X is I or L
  MISC_FEATURE (16)..(16): X is E, K or D
  MISC_FEATURE (17)..(17): X is E, K, R or N
  MISC_FEATURE (18)..(18): X is I or V
  MISC_FEATURE (19)..(19): X is R, A, E, or L
  MISC_FEATURE (20)..(20): X is R, K, E, or Q
  MISC_FEATURE (22)..(22): X is I or A
  MISC_FEATURE (23)..(23): X is E, K or D
  MISC_FEATURE (24)..(24): X is E, K, Q or D
  MISC_FEATURE (25)..(25): X is A, V or I
  MISC_FEATURE (26)..(26): X is E, R, A, or K
  MISC_FEATURE (27)..(27): X is E, R, or K
  MISC_FEATURE (28)..(28): X is E, S, A, or T
  MISC_FEATURE (29)..(29): X is N, Q or T
  MISC_FEATURE (30)..(30): X is N, D or S
  MISC_FEATURE (31)..(31): X is P, E, T or Q
  MISC_FEATURE (32)..(32): X is N, E, T or D
  MISC_FEATURE (33)..(33): X is N, E, K or D
  MISC_FEATURE (34)..(34): X is I or A
  MISC_FEATURE (35)..(35): X is K, E, T or R
  MISC_FEATURE (36)..(36): X is K or E
  MISC_FEATURE (37)..(37): X is I or E
  MISC_FEATURE (38)..(38): X is L or W
  MISC_FEATURE (39)..(39): X is E, K or R
  MISC_FEATURE (40)..(40): X is E, K, N or R
  MISC_FEATURE (42)..(42): X is E, K, or R
  MISC_FEATURE (43)..(43): X is E or K
  MISC_FEATURE (44)..(44): X is E, A, I or K
  MISC_FEATURE (46)..(46): X is E, R or K
  MISC_FEATURE (47)..(47): X is E, R or K
  MISC_FEATURE (49)..(49): X is E, I or K
  MISC_FEATURE (50)..(50): X is E, R or K
  MISC_FEATURE (51)..(51): X is E, R, T or K
  MISC_FEATURE (53)..(53): X is E, R or K
  MISC_FEATURE (54)..(54): X is E, R, Q or K
  MISC_FEATURE (55)..(55): X is I, Q or T
  MISC_FEATURE (56)..(56): X is V or A
  MISC_FEATURE (57)..(57): X is K or N
  MISC_FEATURE (58)..(58): X is S, K or D
  MISC_FEATURE (59)..(59): X is T or P
XXXAXXXXXXAXXAXXXXXXAXXXXXXXXXXXXXXXXXXXAXXXAXXAXXXAXXXXXXX

SEQ ID NO: 334 - protein, 61 aa, Artificial Sequence
  Synthetic
TSEIDKLIKKLRQTAKEVKREAEERKRRSTDPTVREVIERLAQLALDVAEEAARLIKKATT

SEQ ID NO: 335 - protein, 60 aa, Artificial Sequence
  Synthetic
SEVAKLVWKLARTAIEVIREAIERAERSTDPEVIRVILELARLAAEVAKEAARLIVKATT

SEQ ID NO: 336 - protein, 59 aa, Artificial Sequence
  Synthetic
EEVAKKVWKEAYRAIEEIRKAIEKAERSTDPNEIKKILEEARKKAEEAIERAKEIVKST

SEQ ID NO: 337 - protein, 62 aa, Artificial Sequence
  Synthetic
  MISC_FEATURE (2)..(2): X is P, S, T, or N
  MISC_FEATURE (3)..(3): X is R, E or K
  MISC_FEATURE (4)..(4): X is E or D
  MISC_FEATURE (5)..(5): X is R, K, Q or D
  MISC_FEATURE (6)..(6): X is L or V
  MISC_FEATURE (7)..(8): X is E, R or K
  MISC_FEATURE (10)..(10): X is E, R or K
  MISC_FEATURE (11)..(11): X is E, R, Q or K
  MISC_FEATURE (12)..(12): X is R or K
  MISC_FEATURE (14)..(14): X is E, D, Q or K
  MISC_FEATURE (15)..(15): X is E or K
  MISC_FEATURE (16)..(16): X is I or V
  MISC_FEATURE (17)..(17): X is R, E, or K
  MISC_FEATURE (18)..(18): X is R, E, or K
  MISC_FEATURE (19)..(19): X is L, D, T or K
  MISC_FEATURE (20)..(20): X is I or V
  MISC_FEATURE (21)..(21): X is D, R, E or K
  MISC_FEATURE (24)..(24): X is R or E
  MISC_FEATURE (27)..(27): X is R or E
  MISC_FEATURE (28)..(28): X is R, K or E
  MISC_FEATURE (29)..(29): X is Q, S, K, or N
  MISC_FEATURE (32)..(32): X is K, W, P or S
  MISC_FEATURE (33)..(33): X is E, D, K, or T
  MISC_FEATURE (34)..(34): X is E or K
  MISC_FEATURE (36)..(36): X is E, R or K
  MISC_FEATURE (37)..(37): X is E or K
  MISC_FEATURE (38)..(38): X is V, A, E or Q
  MISC_FEATURE (40)..(40): X is R, E or D
  MISC_FEATURE (41)..(41): X is R, E, K or Q
  MISC_FEATURE (43)..(43): X is R or E
  MISC_FEATURE (44)..(44): X is K or E
  MISC_FEATURE (45)..(45): X is Q, D, K or L
  MISC_FEATURE (47)..(47): X is R, E, K or D
  MISC_FEATURE (48)..(48): X is R, E, or K
  MISC_FEATURE (49)..(49): X is V or A
  MISC_FEATURE (50)..(50): X is T, E, A or Q
  MISC_FEATURE (51)..(51): X is R, E, K or D
  MISC_FEATURE (52)..(52): X is E or I
  MISC_FEATURE (54)..(54): X is E, K, N or S
  MISC_FEATURE (55)..(55): X is E, K, or R
  MISC_FEATURE (56)..(56): X is I or L
  MISC_FEATURE (58)..(58): X is K or E
  MISC_FEATURE (60)..(60): X is S or A
  MISC_FEATURE (61)..(61): X is D, K or E
TXXXXXXXAXXXVXXXXXXXXKAXKLXXXGNXXXAXXXLXXAXXXIXXXXXXLXXXAXNXXT

SEQ ID NO: 338 - protein, 61 aa, Artificial Sequence
  Synthetic
  MISC_FEATURE (1)..(1): X is P, A, V or N
  MISC_FEATURE (3)..(3): X is L or I
  MISC_FEATURE (5)..(5): X is L or V
  MISC_FEATURE (9)..(9): X is E or K
  MISC_FEATURE (11)..(11): X is L or I
  MISC_FEATURE (13)..(13): X is R, K, E or D
  MISC_FEATURE (15)..(15): X is I or V
  MISC_FEATURE (16)..(16): X is K, E or R
  MISC_FEATURE (19)..(19): X is I or V
  MISC_FEATURE (20)..(20): X is E or R
  MISC_FEATURE (23)..(23): X is E or K
  MISC_FEATURE (26)..(26): X is Q, A, or L
  MISC_FEATURE (27)..(27): X is E, R, K or N
  MISC_FEATURE (28)..(28): X is Q or S
  MISC_FEATURE (31)..(31): X is K, T or S
  MISC_FEATURE (32)..(32): X is E or D
  MISC_FEATURE (33)..(33): X is E or D
  MISC_FEATURE (35)..(35): X is E, K, R or D
  MISC_FEATURE (36)..(36): X is S, K, R or D
  MISC_FEATURE (37)..(37): X is V or A
  MISC_FEATURE (39)..(39): X is R, E, D, or K
  MISC_FEATURE (40)..(40): X is R, E, T, or K
  MISC_FEATURE (42)..(42): X is R, E, or T
  MISC_FEATURE (43)..(43): X is E or K
  MISC_FEATURE (44)..(44): X is L, Q, A or E
  MISC_FEATURE (46)..(46): X is K, E or R
  MISC_FEATURE (47)..(47): X is K, E, N or R
  MISC_FEATURE (48)..(48): X is V or A
  MISC_FEATURE (49)..(49): X is T, E, R or A
  MISC_FEATURE (50)..(50): X is K, E, R or Q
  MISC_FEATURE (51)..(51): X is L or T
  MISC_FEATURE (53)..(53): X is E, K, R or N
  MISC_FEATURE (54)..(54): X is E, K, R or Q
  MISC_FEATURE (55)..(55): X is I or L
  MISC_FEATURE (57)..(57): X is K, Q, or R
  MISC_FEATURE (59)..(59): X is S or A
  MISC_FEATURE (60)..(60): X is D or E
XEXAXRAAXLXVXLXXLLXXIAXLLXXXGNXXXAXXXLXXAXXXIXXXXXXLXXXAXNXXT

SEQ ID NO: 339 - protein, 60 aa, Artificial Sequence
  Synthetic
  MISC_FEATURE (1)..(1): X is P, A, T or V
  MISC_FEATURE (3)..(3): X is L or I
  MISC_FEATURE (5)..(5): X is K, Q or E
  MISC_FEATURE (9)..(9): X is K, D, R or E
  MISC_FEATURE (11)..(11): X is L or I
  MISC_FEATURE (12)..(12): X is K, E, R or Q
  MISC_FEATURE (13)..(13): X is K, E, or R
  MISC_FEATURE (15)..(15): X is I or V
  MISC_FEATURE (16)..(16): X is E, R, or K
  MISC_FEATURE (19)..(19): X is E, R, Q or K
  MISC_FEATURE (20)..(20): X is E, R, T or K
  MISC_FEATURE (23)..(23): X is E or K
  MISC_FEATURE (26)..(26): X is E or K
  MISC_FEATURE (27)..(27): X is E, R or Q
  MISC_FEATURE (28)..(28): X is E, S, N or Q
  MISC_FEATURE (31)..(31): X is E, S, K or P
  MISC_FEATURE (32)..(32): X is E or D
  MISC_FEATURE (33)..(33): X is E or D
  MISC_FEATURE (35)..(35): X is E, K, N or Q
  MISC_FEATURE (36)..(36): X is E, K, R or D
  MISC_FEATURE (37)..(37): X is V or A
  MISC_FEATURE (38)..(38): X is K, E or Q
  MISC_FEATURE (39)..(39): X is K, E, R or D
  MISC_FEATURE (40)..(40): X is K, E, R or D
  MISC_FEATURE (42)..(42): X is K, E, N or D
  MISC_FEATURE (43)..(43): X is K, E, or Q
  MISC_FEATURE (44)..(44): X is L, A, D or Q
  MISC_FEATURE (45)..(45): X is E or K
  MISC_FEATURE (46)..(46): X is E or K
  MISC_FEATURE (47)..(47): X is E, D, R or K
  MISC_FEATURE (48)..(48): X is V or A
  MISC_FEATURE (49)..(49): X is R, K, Q or E
  MISC_FEATURE (50)..(50): X is K, Q or E
  MISC_FEATURE (51)..(51): X is L, I, K, or Q
  MISC_FEATURE (52)..(52): X is Eor K
  MISC_FEATURE (53)..(53): X is D, Q, E or K
  MISC_FEATURE (54)..(54): X is D, R, E or K
  MISC_FEATURE (55)..(55): X is I or L
  MISC_FEATURE (56)..(56): X is R or K
  MISC_FEATURE (57)..(57): X is D or K
  MISC_FEATURE (58)..(58): X is N or H
  MISC_FEATURE (60)..(60): X is D, E, or K
XEXAXRAAXLXXXLXXLLXXIAXLLXXXGNXXXAXXXXXXAXXXXXXXXXXXXXXXXXSX

SEQ ID NO: 340 - protein, 62 aa, Artificial Sequence
  Synthetic
TPRERLEEAKERVEEIRELIDKARKLQEQGNKEEAEKVLREAREQIREVTRELEEIAKNSDT

SEQ ID NO: 341 - protein, 61 aa, Artificial Sequence
  Synthetic
PELALRAAELLVRLIKLLIEIAKLLQEQGNKEEAEKVLREATELIKRVTELLEKIAKNSDT

SEQ ID NO: 342 - protein, 60 aa, Artificial Sequence
  Synthetic
PELAKRAAELLKRLIELLKEIAKLLEEEGNEDEAEKVKEEAKELEERVRELEERIRKNSD

SEQ ID NO: 343 - protein, 63 aa, Artificial Sequence
  Synthetic
  MISC_FEATURE (1)..(1): X is N or D
  MISC_FEATURE (2)..(2): X is P or S
  MISC_FEATURE (3)..(3): X is Q, E, D or K
  MISC_FEATURE (4)..(4): X is E, D or K
  MISC_FEATURE (5)..(5): X is E, D, L or K
  MISC_FEATURE (6)..(6): X is L or A
  MISC_FEATURE (7)..(7): X is E, K or R
  MISC_FEATURE (8)..(8): X is E, K or R
  MISC_FEATURE (10)..(10): X is E, K or R
  MISC_FEATURE (11)..(11): X is E, K or Q
  MISC_FEATURE (12)..(12): X is V or L
  MISC_FEATURE (13)..(13): X is V or A
  MISC_FEATURE (14)..(14): X is R, E or K
  MISC_FEATURE (15)..(15): X is S, E or K
  MISC_FEATURE (16)..(16): X is V, A or I
  MISC_FEATURE (17)..(17): X is E, K, H or Q
  MISC_FEATURE (18)..(18): X is E, K, or R
  MISC_FEATURE (19)..(19): X is V, A, D or I
  MISC_FEATURE (20)..(20): X is V, A, L or I
  MISC_FEATURE (21)..(21): X is Q, E, R or K
  MISC_FEATURE (22)..(22): X is D, E, R or K
  MISC_FEATURE (24)..(24): X is E, R or K
  MISC_FEATURE (25)..(25): X is Q, E, R or K
  MISC_FEATURE (27)..(27): X is Q, T or S
  MISC_FEATURE (28)..(28): X is R, K or E
  MISC_FEATURE (29)..(29): X is D, K or E
  MISC_FEATURE (31)..(31): X is D or N
  MISC_FEATURE (32)..(32): X is K or E
  MISC_FEATURE (33)..(33): X is D, T or E
  MISC_FEATURE (34)..(34): X is R, K, T or E
  MISC_FEATURE (35)..(35): X is V or A
  MISC_FEATURE (36)..(36): X is E, R, K or Q
  MISC_FEATURE (37)..(37): X is E, R, or K
  MISC_FEATURE (38)..(38): X is L or R
  MISC_FEATURE (39)..(39): X is I or T
  MISC_FEATURE (40)..(40): X is K or E
  MISC_FEATURE (41)..(41): X is K, R or E
  MISC_FEATURE (43)..(43): X is D, S, R or E
  MISC_FEATURE (44)..(44): X is N, Q, K or E
  MISC_FEATURE (45)..(45): X is L, Q, K or A
  MISC_FEATURE (46)..(46): X is I or V
  MISC_FEATURE (47)..(47): X is R, E, K or Q
  MISC_FEATURE (48)..(48): X is R, E, or K
  MISC_FEATURE (50)..(50): X is R, E, T or K
  MISC_FEATURE (51)..(51): X is E, T or K
  MISC_FEATURE (52)..(52): X is L, E, A or K
  MISC_FEATURE (54)..(54): X is E, R, D or Q
  MISC_FEATURE (55)..(55): X is E, R, or K
  MISC_FEATURE (56)..(56): X is V or A
  MISC_FEATURE (57)..(57): X is V, K, R or A
  MISC_FEATURE (58)..(58): X is N, K, or R
  MISC_FEATURE (59)..(59): X is Q, N, K, or D
  MISC_FEATURE (60)..(60): X is N, R, A or D
  MISC_FEATURE (62)..(62): X is T or D
  MISC_FEATURE (63)..(63): X is N or D
XXXXXXXXAXXXXXXXXXXXXXAXXAXXXGXXXXXXXXXXXAXXXXXXAXXXLXXXXXXXPXX

SEQ ID NO: 344 - protein, 62 aa, Artificial Sequence
  Synthetic
  MISC_FEATURE (1)..(1): X is P, W or A
  MISC_FEATURE (2)..(2): X is E, K, D or Q
  MISC_FEATURE (3)..(3): X is V, A or L
  MISC_FEATURE (5)..(5): X is A or L
  MISC_FEATURE (6)..(6): X is R, E, K or Q
  MISC_FEATURE (7)..(7): X is V or I
  MISC_FEATURE (9)..(9): X is E, R, K or Q
  MISC_FEATURE (11)..(11): X is I or L
  MISC_FEATURE (12)..(12): X is V or A
  MISC_FEATURE (13)..(13): X is R, E, D or K
  MISC_FEATURE (15)..(15): X is V, A or I
  MISC_FEATURE (16)..(16): X is E, R, K or N
  MISC_FEATURE (17)..(17): X is V, A, I or N
  MISC_FEATURE (18)..(18): X is V, A, or I
  MISC_FEATURE (19)..(19): X is L, V, A, or I
  MISC_FEATURE (20)..(20): X is E, R or K
  MISC_FEATURE (23)..(23): X is E or K
  MISC_FEATURE (24)..(24): X is E or L
  MISC_FEATURE (26)..(26): X is E, Q or A
  MISC_FEATURE (27)..(27): X is K, N, E, or Q
  MISC_FEATURE (28)..(28): X is D, N, E, or T
  MISC_FEATURE (30)..(30): X is D or N
  MISC_FEATURE (31)..(31): X is K or E
  MISC_FEATURE (32)..(32): X is K, D or E
  MISC_FEATURE (33)..(33): X is Q, K, E or T
  MISC_FEATURE (34)..(34): X is V or A
  MISC_FEATURE (35)..(35): X is E, R, H or Q
  MISC_FEATURE (36)..(36): X is E, R, K or Q
  MISC_FEATURE (38)..(38): X is I or D
  MISC_FEATURE (39)..(39): X is Q, E, R or K
  MISC_FEATURE (40)..(40): X is T, Q, E, or D
  MISC_FEATURE (42)..(42): X is K, Q, E, or S
  MISC_FEATURE (43)..(43): X is K, E or R
  MISC_FEATURE (44)..(44): X is L, D, A or I
  MISC_FEATURE (45)..(45): X is V or I
  MISC_FEATURE (46)..(46): X is R, E, Q or K
  MISC_FEATURE (47)..(47): X is E, D or K
  MISC_FEATURE (49)..(49): X is E, R, T or K
  MISC_FEATURE (50)..(50): X is E, R or K
  MISC_FEATURE (51)..(51): X is L or A
  MISC_FEATURE (53)..(53): X is E, D, R or K
  MISC_FEATURE (54)..(54): X is E, Q, R or K
  MISC_FEATURE (55)..(55): X is V or A
  MISC_FEATURE (56)..(56): X is S, A, K or R
  MISC_FEATURE (57)..(57): X is D, N, K or R
  MISC_FEATURE (58)..(58): X is D, N, K or E
  MISC_FEATURE (59)..(59): X is I, R, A, or D
  MISC_FEATURE (61)..(61): X is T or D
  MISC_FEATURE (62)..(62): X is N or D
XXXLXXXAXLXXXLXXXXXXLAXXAXXXGXXXXXXXLXXXAXXXXXXAXXXLXXXXXXXPXX

SEQ ID NO: 345 - protein, 61 aa, Artificial Sequence
  Synthetic
  MISC_FEATURE (1)..(1): X is P, W, or A
  MISC_FEATURE (2)..(2): X is E, D, K or H
  MISC_FEATURE (3)..(3): X is S, A or L
  MISC_FEATURE (5)..(5): X is K, Q or R
  MISC_FEATURE (6)..(6): X is K, E or R
  MISC_FEATURE (7)..(7): X is V or I
  MISC_FEATURE (9)..(9): X is E, D, K or Q
  MISC_FEATURE (11)..(11): X is I or L
  MISC_FEATURE (12)..(12): X is K, E, D or R
  MISC_FEATURE (13)..(13): X is K, E, or R
  MISC_FEATURE (15)..(15): X is V, A, I or R
  MISC_FEATURE (16)..(16): X is K or E
  MISC_FEATURE (17)..(17): X is V, A, I or N
  MISC_FEATURE (18)..(18): X is V, A, or I
  MISC_FEATURE (19)..(19): X is D, E, or K
  MISC_FEATURE (20)..(20): X is R, E, or K
  MISC_FEATURE (21)..(21): X is L or Q
  MISC_FEATURE (22)..(22): X is S or A
  MISC_FEATURE (23)..(23): X is K or E
  MISC_FEATURE (24)..(24): X is L or S
  MISC_FEATURE (26)..(26): X is E, K or Q
  MISC_FEATURE (27)..(27): X is K or R
  MISC_FEATURE (28)..(28): X is N, E, S or T
  MISC_FEATURE (30)..(30): X is N or D
  MISC_FEATURE (31)..(31): X is R, E, S or T
  MISC_FEATURE (32)..(32): X is D or E
  MISC_FEATURE (33)..(33): X is Q, K, T or D
  MISC_FEATURE (34)..(34): X is V or A
  MISC_FEATURE (35)..(35): X is E, K, R or N
  MISC_FEATURE (36)..(36): X is E, K, R or T
  MISC_FEATURE (38)..(38): X is E, K, R or N
  MISC_FEATURE (39)..(39): X is E, K, or Q
  MISC_FEATURE (40)..(40): X is L, E, T, or Q
  MISC_FEATURE (42)..(42): X is E, K, or R
  MISC_FEATURE (43)..(43): X is E, K, Q or R
  MISC_FEATURE (44)..(44): X is L, A, I or D
  MISC_FEATURE (45)..(45): X is R, E, or K
  MISC_FEATURE (46)..(46): X is R, E, or K
  MISC_FEATURE (47)..(47): X is D, Q, E, or K
  MISC_FEATURE (49)..(49): X is R, E, or K
  MISC_FEATURE (50)..(50): X is Q, E, or K
  MISC_FEATURE (51)..(51): X is L or A
  MISC_FEATURE (52)..(52): X is E, K or Q
  MISC_FEATURE (53)..(53): X is E, K or R
  MISC_FEATURE (54)..(54): X is I, L, D or R
  MISC_FEATURE (55)..(55): X is V or A
  MISC_FEATURE (56)..(56): X is K, R or E
  MISC_FEATURE (57)..(57): X is K, R, D or N
  MISC_FEATURE (58)..(58): X is E, N, Q or T
  MISC_FEATURE (59)..(59): X is R, A, D, or Q
  MISC_FEATURE (61)..(61): X is D or T
XXXLXXXAXLXXXLXXXXXXXXXXAXXXGXXXXXXXLXXXAXXXXXXAXXXXXXXXXXXPX

SEQ ID NO: 346 - protein, 63 aa, Artificial Sequence
  Synthetic
NPQEDLERAEKVVRSVEEVLQRAKEAQREGDKEKVERLIKEAENQIRKARELLERVVRQNPDD

SEQ ID NO: 347 - protein, 62 aa, Artificial Sequence
  Synthetic
PEVLLRVAELIVRLVEVVLELAKLAEKNGDKEQVERLIQTAEELIREARELLERVSREIPDN

SEQ ID NO: 348 - protein, 61 aa, Artificial Sequence
  Synthetic
PESLKRVAELIKRLVKVVDELSKLAERNGDRDQVERLRQLAEELRREAEELEERVRRERPD

SEQ ID NO: 349 - protein, 51 aa, Artificial Sequence
  Synthetic
  MISC_FEATURE (1)..(1): X is S, D, or N
  MISC_FEATURE (2)..(2): X is T, S, D, or N
  MISC_FEATURE (3)..(3): X is E, D, or K
  MISC_FEATURE (4)..(4): X is E, D, or Q
  MISC_FEATURE (5)..(5): X is K, L, R, or T
  MISC_FEATURE (6)..(6): X is I, L or A
  MISC_FEATURE (7)..(7): X is E, K or Q
  MISC_FEATURE (8)..(8): X is E, K, D or S
  MISC_FEATURE (10)..(10): X is R, E, K,  or Q
  MISC_FEATURE (11)..(11): X is R, D, K,  or Q
  MISC_FEATURE (12)..(12): X is S or A
  MISC_FEATURE (13)..(13): X is I or V
  MISC_FEATURE (14)..(14): X is K, E or R
  MISC_FEATURE (15)..(15): X is K, E, Q or R
  MISC_FEATURE (17)..(17): X is K, E, or Q
  MISC_FEATURE (18)..(18): X is K, E, or R
  MISC_FEATURE (19)..(19): X is S, A, D, or N
  MISC_FEATURE (20)..(20): X is L, A, H, or R
  MISC_FEATURE (21)..(21): X is K, E, D or R
  MISC_FEATURE (22)..(22): X is K, E, Q or R
  MISC_FEATURE (24)..(24): X is N, S, or D
  MISC_FEATURE (25)..(25): X is P, D, K or S
  MISC_FEATURE (26)..(26): X is E, D, K or Q
  MISC_FEATURE (27)..(27): X is K, S, T or E
  MISC_FEATURE (29)..(29): X is K, R or E
  MISC_FEATURE (30)..(30): X is K, R, Q or E
  MISC_FEATURE (31)..(31): X is D or A
  MISC_FEATURE (32)..(32): X is V, L, I or A
  MISC_FEATURE (33)..(33): X is R, K, Q or E
  MISC_FEATURE (34)..(34): X is R, K, or E
  MISC_FEATURE (36)..(36): X is L, Q, or E
  MISC_FEATURE (37)..(37): X is K, D, N or E
  MISC_FEATURE (38)..(38): X is L, A or I
  MISC_FEATURE (39)..(39): X is A or V
  MISC_FEATURE (40)..(40): X is K, E, Q or R
  MISC_FEATURE (41)..(41): X is K, E, or R
  MISC_FEATURE (42)..(42): X is L, I or A
  MISC_FEATURE (43)..(43): X is E, S, A or I
  MISC_FEATURE (44)..(44): X is K, E, R or Q
  MISC_FEATURE (45)..(45): X is L, E, R or D
  MISC_FEATURE (47)..(47): X is K, E, R or Q
  MISC_FEATURE (48)..(48): X is K, E, R or T
  MISC_FEATURE (49)..(49): X is K, Q, R or T
  MISC_FEATURE (50)..(50): X is G or D
  MISC_FEATURE (51)..(51): X is S, N or D
XXXXXXXXAXXXXXXAXXXXXXGXXXXAXXXXXXAXXXXXXXXXXAXXXXX

SEQ ID NO: 350 - protein, 50 aa, Artificial Sequence
  Synthetic
  MISC_FEATURE (1)..(1): X is T, I, D or V
  MISC_FEATURE (2)..(2): X is E, R, D or K
  MISC_FEATURE (3)..(3): X is V or A
  MISC_FEATURE (5)..(5): X is L, I, V or A
  MISC_FEATURE (6)..(6): X is E, K, A, or D
  MISC_FEATURE (9)..(9): X is E, K, or R
  MISC_FEATURE (10)..(10): X is L or I
  MISC_FEATURE (12)..(12): X is V or I
  MISC_FEATURE (13)..(13): X is E, R, K or Q
  MISC_FEATURE (14)..(14): X is V or A
  MISC_FEATURE (16)..(16): X is R, E, K or D
  MISC_FEATURE (17)..(17): X is V or A
  MISC_FEATURE (19)..(19): X is L , A or Q
  MISC_FEATURE (20)..(20): X is K, E, R or N
  MISC_FEATURE (21)..(21): X is V or T
  MISC_FEATURE (23)..(23): X is S or D
  MISC_FEATURE (24)..(24): X is S, P or T
  MISC_FEATURE (25)..(25): X is E, D or Q
  MISC_FEATURE (26)..(26): X is T, L or V
  MISC_FEATURE (28)..(28): X is R or E
  MISC_FEATURE (29)..(29): X is K or E
  MISC_FEATURE (31)..(31): X is V, A, I or L
  MISC_FEATURE (32)..(32): X is R, E, K or Q
  MISC_FEATURE (33)..(33): X is T, E, L or Q
  MISC_FEATURE (36)..(36): X is E, K, N or Q
  MISC_FEATURE (37)..(37): X is L, I or A
  MISC_FEATURE (38)..(38): X is V or A
  MISC_FEATURE (39)..(39): X is Q, R, K or E
  MISC_FEATURE (40)..(40): X is R, D or E
  MISC_FEATURE (41)..(41): X is L, A or I
  MISC_FEATURE (42)..(42): X is E, A, K or R
  MISC_FEATURE (43)..(43): X is E, K or R
  MISC_FEATURE (44)..(44): X is E, A, Q or R
  MISC_FEATURE (46)..(46): X is E, K or R
  MISC_FEATURE (47)..(47): X is E, K or R
  MISC_FEATURE (48)..(48): X is T, S, E or H
  MISC_FEATURE (50)..(50): X is S, D or N
XXXLXXAAXXAXXXAXXAXXXGXXXXAXXAXXXALXXXXXXXXXAXXXGX

SEQ ID NO: 351 - protein, 49 aa, Artificial Sequence
  Synthetic
  MISC_FEATURE (1)..(1): X is D, T, I or R
  MISC_FEATURE (2)..(2): X is E, D, Q or K
  MISC_FEATURE (3)..(3): X is V, A or T
  MISC_FEATURE (5)..(5): X is K, E, R or Q
  MISC_FEATURE (6)..(6): X is K, E, R or T
  MISC_FEATURE (9)..(9): X is K, E, R or D
  MISC_FEATURE (10)..(10): X is L or I
  MISC_FEATURE (12)..(12): X is K, E or R
  MISC_FEATURE (13)..(13): X is K, E, Q or R
  MISC_FEATURE (14)..(14): X is V or A
  MISC_FEATURE (16)..(16): X is R, K or E
  MISC_FEATURE (17)..(17): X is V or A
  MISC_FEATURE (19)..(19): X is K, Q, E, or R
  MISC_FEATURE (20)..(20): X is K, Q, E, or R
  MISC_FEATURE (21)..(21): X is V or T
  MISC_FEATURE (23)..(23): X is S or D
  MISC_FEATURE (24)..(24): X is P, S or D
  MISC_FEATURE (25)..(25): X is E or D
  MISC_FEATURE (26)..(26): X is T, L, S or V
  MISC_FEATURE (28)..(28): X is R, Q, K or E
  MISC_FEATURE (29)..(29): X is K, Q, D or E
  MISC_FEATURE (31)..(31): X is K, Q, R or E
  MISC_FEATURE (32)..(32): X is K, Q, R or E
  MISC_FEATURE (33)..(33): X is T, L, Q or A
  MISC_FEATURE (35)..(35): X is K, E, Q or R
  MISC_FEATURE (36)..(36): X is K, N, D or R
  MISC_FEATURE (37)..(37): X is L, I or A
  MISC_FEATURE (38)..(38): X is R, E, K or D
  MISC_FEATURE (39)..(39): X is Q, E, or K
  MISC_FEATURE (40)..(40): X is A, Q, E, or K
  MISC_FEATURE (41)..(41): X is L, I, A,  or K
  MISC_FEATURE (42)..(42): X is R, E  or K
  MISC_FEATURE (43)..(43): X is R, E, D  or K
  MISC_FEATURE (44)..(44): X is N, E, A or Q
  MISC_FEATURE (45)..(45): X is R, A, N or D
  MISC_FEATURE (46)..(46): X is R, E, or K
  MISC_FEATURE (47)..(47): X is R or K
  MISC_FEATURE (48)..(48): X is K, Q, R or N
XXXLXXAAXXAXXXAXXAXXXGXXXXAXXAXXXAXXXXXXXXXXXXXXG

SEQ ID NO: 352 - protein, 51 aa, Artificial Sequence
  Synthetic
STEEKIEEARQSIKEAERSLREGNPEKAREDVRRALELVRELEKLARKTGS

SEQ ID NO: 353 - protein, 50 aa, Artificial Sequence
  Synthetic
TEVLIEAARLAIEVARVALKVGSPETAREAVRTALELVQELERQARKTGS

SEQ ID NO: 354 - protein, 49 aa, Artificial Sequence
  Synthetic
DEVLKRAAELAKEVARVAKEVGSPETARQARETAERLREELRRNREKKG

SEQ ID NO: 355 - protein, 51 aa, Artificial Sequence
  Synthetic
  MISC_FEATURE (1)..(1): X is D or N
  MISC_FEATURE (2)..(2): X is P, S or D
  MISC_FEATURE (3)..(3): X is E or D
  MISC_FEATURE (4)..(4): X is E, R or D
  MISC_FEATURE (5)..(5): X is I, T, V or D
  MISC_FEATURE (6)..(6): X is L, A, E or T
  MISC_FEATURE (7)..(7): X is E or K
  MISC_FEATURE (8)..(8): X is R, N or K
  MISC_FEATURE (10)..(10): X is R, E, Q or K
  MISC_FEATURE (11)..(11): X is R, E or K
  MISC_FEATURE (12)..(12): X is S, A or E
  MISC_FEATURE (14)..(14): X is R, D, K or E
  MISC_FEATURE (15)..(15): X is R, T, K or E
  MISC_FEATURE (17)..(17): X is R or E
  MISC_FEATURE (18)..(18): X is K, Q or E
  MISC_FEATURE (20)..(20): X is S, A, H or K
  MISC_FEATURE (21)..(21): X is E, N or K
  MISC_FEATURE (22)..(22): X is R, K, Q or D
  MISC_FEATURE (25)..(25): X is E, D, S or Q
  MISC_FEATURE (26)..(26): X is E, D, K or Q
  MISC_FEATURE (27)..(27): X is E, K or T
  MISC_FEATURE (29)..(29): X is R, K or Q
  MISC_FEATURE (30)..(30): X is R, K, E or D
  MISC_FEATURE (33)..(33): X is R, K, E or Q
  MISC_FEATURE (34)..(34): X is R, K, T or N
  MISC_FEATURE (37)..(37): X is E, K, D or R
  MISC_FEATURE (38)..(38): X is L, I, T or V
  MISC_FEATURE (40)..(40): X is K, Q, R, or E
  MISC_FEATURE (41)..(41): X is K or R
  MISC_FEATURE (42)..(42): X is L or A
  MISC_FEATURE (43)..(43): X is V or A
  MISC_FEATURE (44)..(44): X is E, K, or D
  MISC_FEATURE (45)..(45): X is E, K, Q or R
  MISC_FEATURE (47)..(47): X is E, K, S or R
  MISC_FEATURE (48)..(48): X is E, K, N or Q
  MISC_FEATURE (49)..(49): X is E, K, D or Q
  MISC_FEATURE (51)..(51): X is D or N
XXXXXXXXAXXXLXXAXXAXXXGDXXXFXXAAXXALXXAXXXXXXAXXXGX

SEQ ID NO: 356 - protein, 50 aa, Artificial Sequence
  Synthetic
  MISC_FEATURE (1)..(1): X is P or A
  MISC_FEATURE (2)..(2): X is E, K or Q
  MISC_FEATURE (3)..(3): X is L or A
  MISC_FEATURE (4)..(4): X is V or I
  MISC_FEATURE (5)..(5): X is L or A
  MISC_FEATURE (6)..(6): X is E, D, or K
  MISC_FEATURE (9)..(9): X is K, R, E or Q
  MISC_FEATURE (10)..(10): X is V or I
  MISC_FEATURE (13)..(13): X is R, E or K
  MISC_FEATURE (14)..(14): X is V or L
  MISC_FEATURE (16)..(16): X is E or R
  MISC_FEATURE (19)..(19): X is A or K
  MISC_FEATURE (20)..(20): X is E, R or K
  MISC_FEATURE (21)..(21): X is N, K, Q or E
  MISC_FEATURE (24)..(24): X is D, K, Q or S
  MISC_FEATURE (25)..(25): X is D, Q or E
  MISC_FEATURE (28)..(28): X is K, Q or R
  MISC_FEATURE (29)..(29): X is K, D, Q or E
  MISC_FEATURE (32)..(32): X is K, E, D or R
  MISC_FEATURE (33)..(33): X is S, T, A, or V
  MISC_FEATURE (36)..(36): X is T, K, or E
  MISC_FEATURE (37)..(37): X is V, I or L
  MISC_FEATURE (39)..(39): X is K, Q, oR E
  MISC_FEATURE (40)..(40): X is R, E or D
  MISC_FEATURE (41)..(41): X is L or A
  MISC_FEATURE (42)..(42): X is V or A
  MISC_FEATURE (43)..(43): X is R, E or K
  MISC_FEATURE (44)..(44): X is V, E or Q
  MISC_FEATURE (46)..(46): X is R, S, E or K
  MISC_FEATURE (47)..(47): X is N, E or K
  MISC_FEATURE (48)..(48): X is E or Q
  MISC_FEATURE (50)..(50): X is D or N
XXXXXXAAXXALXXAXLAXXXGDXXVFXXAAXXALXXAXXXXXXAXXXGX

SEQ ID NO: 357 - protein, 49 aa, Artificial Sequence
  Synthetic
  MISC_FEATURE (1)..(1): X is P, A, L or T
  MISC_FEATURE (2)..(2): X is E, D or N
  MISC_FEATURE (3)..(3): X is L or A
  MISC_FEATURE (4)..(4): X is V or I
  MISC_FEATURE (5)..(5): X is E, R, K or Q
  MISC_FEATURE (6)..(6): X is E, L, K or Q
  MISC_FEATURE (9)..(9): X is E, R, K or Q
  MISC_FEATURE (10)..(10): X is V or I
  MISC_FEATURE (12)..(12): X is E, K or R
  MISC_FEATURE (13)..(13): X is E, K or R
  MISC_FEATURE (14)..(14): X is V or L
  MISC_FEATURE (15)..(15): X is R or A
  MISC_FEATURE (16)..(16): X is K, E or R
  MISC_FEATURE (19)..(19): X is K, E or R
  MISC_FEATURE (20)..(20): X is K or E
  MISC_FEATURE (21)..(21): X is R, Q,K or E
  MISC_FEATURE (24)..(24): X is R, D, S or E
  MISC_FEATURE (25)..(25): X is D or E
  MISC_FEATURE (26)..(26): X is V or L
  MISC_FEATURE (27)..(27): X is Y, F or R
  MISC_FEATURE (28)..(28): X is E or K
  MISC_FEATURE (29)..(29): X is R, Q, E or K
  MISC_FEATURE (31)..(31): X is R, E or Q
  MISC_FEATURE (32)..(32): X is R, E, D or K
  MISC_FEATURE (33)..(33): X is T, V or A
  MISC_FEATURE (35)..(35): X is R or E
  MISC_FEATURE (36)..(36): X is K, T, R or E
  MISC_FEATURE (37)..(37): X is V, I or L
  MISC_FEATURE (38)..(38): X is K, E, R or T
  MISC_FEATURE (39)..(39): X is K or E
  MISC_FEATURE (40)..(40): X is I, R or E
  MISC_FEATURE (41)..(41): X is L or A
  MISC_FEATURE (42)..(42): X is K or E
  MISC_FEATURE (43)..(43): X is K, R, H or E
  MISC_FEATURE (44)..(44): X is V, Q or E
  MISC_FEATURE (45)..(45): X is R or A
  MISC_FEATURE (46)..(46): X is E, K or T
  MISC_FEATURE (47)..(47): X is E, K, R or N
  MISC_FEATURE (48)..(48): X is E, K, or Q
XXXXXXAAXXAXXXXXLAXXXGDXXXXXXAXXXAXXXXXXXXXXXXXXG

SEQ ID NO: 358 - protein, 51 aa, Artificial Sequence
  Synthetic
DPEEILERAKESLERAREASERGDEEEFRKAAEKALELAKRLVEQAKKEGD

SEQ ID NO: 359 - protein, 50 aa, Artificial Sequence
  Synthetic
PELVLEAAKVALRVAELAAKNGDKEVFKKAAESALEVAKRLVEVASKEGD

SEQ ID NO: 360 - protein, 49 aa, Artificial Sequence
  Synthetic
PELVEEAAKVAEEVRKLAKKQGDEEVYEKARETAREVKEELKRVREEKG

SEQ ID NO: 361 - protein, 38 aa, Artificial Sequence
  Synthetic
  MISC_FEATURE (1)..(1): X is D or N
  MISC_FEATURE (2)..(2): X is S, T or D
  MISC_FEATURE (3)..(3): X is E, T or D
  MISC_FEATURE (4)..(4): X is E, T, K or S
  MISC_FEATURE (5)..(5): X is E, D, K or Q
  MISC_FEATURE (6)..(6): X is E, R, K or D
  MISC_FEATURE (8)..(8): X is R or K
  MISC_FEATURE (9)..(9): X is Q, E, D or K
  MISC_FEATURE (10)..(10): X is L, R or K
  MISC_FEATURE (12)..(12): X is E, N, D or K
  MISC_FEATURE (13)..(13): X is E or K
  MISC_FEATURE (15)..(15): X is A, Q, I or K
  MISC_FEATURE (16)..(16): X is E, H or K
  MISC_FEATURE (17)..(17): X is T, I, Vor S
  MISC_FEATURE (19)..(19): X is E or K
  MISC_FEATURE (20)..(20): X is R, E or K
  MISC_FEATURE (21)..(21): X is V, T or A
  MISC_FEATURE (23)..(23): X is D, N or S
  MISC_FEATURE (25)..(25): X is E, D, N or H
  MISC_FEATURE (27)..(27): X is I or K
  MISC_FEATURE (28)..(28): X is E, R or K
  MISC_FEATURE (29)..(29): X is L or T
  MISC_FEATURE (31)..(31): X is K, E, Q, or D
  MISC_FEATURE (32)..(32): X is K, E, Q, or R
  MISC_FEATURE (34)..(34): X is S or A
  MISC_FEATURE (35)..(35): X is Q, K, D or R
  MISC_FEATURE (36)..(36): X is Q, E, D or R
  MISC_FEATURE (38)..(38): X is D or N
XXXXXXAXXXAXXAXXXAXXXGXPXLXXXAXXAXXXGX

SEQ ID NO: 362 - protein, 37 aa, Artificial Sequence
  Synthetic
  MISC_FEATURE (1)..(1): X is S or R
  MISC_FEATURE (2)..(2): X is E, K or D
  MISC_FEATURE (3)..(3): X is K or W
  MISC_FEATURE (5)..(5): X is K, E or R
  MISC_FEATURE (7)..(7): X is V, I or A
  MISC_FEATURE (8)..(8): X is L or K
  MISC_FEATURE (9)..(9): X is L or R
  MISC_FEATURE (12)..(12): X is E or K
  MISC_FEATURE (15)..(15): X is K, L, E or R
  MISC_FEATURE (16)..(16): X is V, I or T
  MISC_FEATURE (19)..(19): X is E, K or Q
  MISC_FEATURE (20)..(20): X is V or T
  MISC_FEATURE (22)..(22): X is D, N or S
  MISC_FEATURE (24)..(24): X is D or E
  MISC_FEATURE (27)..(27): X is K or R
  MISC_FEATURE (30)..(30): X is L, E, Q or R
  MISC_FEATURE (31)..(31): X is E, Q or K
  MISC_FEATURE (34)..(34): X is E, R or K
  MISC_FEATURE (35)..(35): X is E, R, D or N
XXXAXAXXXAAXAAXXAKXXGXPXLIXLAXXAAXXGD

SEQ ID NO: 363 - protein, 36 aa, Artificial Sequence
  Synthetic
  MISC_FEATURE (1)..(1): X is S, A,K or R
  MISC_FEATURE (2)..(2): X is E, D, K or R
  MISC_FEATURE (3)..(3): X is K, Q or W
  MISC_FEATURE (5)..(5): X is R, E or D
  MISC_FEATURE (7)..(7): X is I, A or V
  MISC_FEATURE (8)..(8): X is L, K or R
  MISC_FEATURE (9)..(9): X is E, K or R
  MISC_FEATURE (12)..(12): X is E, K or R
  MISC_FEATURE (13)..(13): X is E, K, T or R
  MISC_FEATURE (15)..(15): X is E, K, L or R
  MISC_FEATURE (16)..(16): X is E or K
  MISC_FEATURE (19)..(19): X is E, Q or K
  MISC_FEATURE (20)..(20): X is E, R or K
  MISC_FEATURE (22)..(22): X is D, S or N
  MISC_FEATURE (23)..(23): X is  S or P
  MISC_FEATURE (24)..(24): X is  E, D, N or Q
  MISC_FEATURE (25)..(25): X is  T, R, K or Q
  MISC_FEATURE (27)..(27): X is  E, K or Q
  MISC_FEATURE (28)..(28): X is  E, K or R
  MISC_FEATURE (30)..(30): X is  E, K, Q or R
  MISC_FEATURE (31)..(31): X is  E, K, or R
  MISC_FEATURE (32)..(32): X is  E, K, or L
  MISC_FEATURE (34)..(34): X is  E, K, Q or R
  MISC_FEATURE (35)..(35): X is  E, K, or R
XXXAXAXXXAAXXAXXAKXXGXXXXIXXAXXXAXXG

SEQ ID NO: 364 - protein, 38 aa, Artificial Sequence
  Synthetic
DSTKEKARQLAEEAKETAEKVGDPELIKLAEQASQEGD

SEQ ID NO: 365 - protein, 37 aa, Artificial Sequence
  Synthetic
SEKAKAILLAAEAARVAKEVGDPELIKLALEAARRGD

SEQ ID NO: 366 - protein, 36 aa, Artificial Sequence
  Synthetic
SEKARAILEAAERAREAKERGDPEQIKKARELAKRG

SEQ ID NO: 367 - protein, 51 aa, Artificial Sequence
  Synthetic
  MISC_FEATURE (1)..(1): X is D, N or S
  MISC_FEATURE (2)..(2): X is D, A or S
  MISC_FEATURE (3)..(3): X is E or R
  MISC_FEATURE (4)..(4): X is E or D
  MISC_FEATURE (5)..(5): X is E, R or K
  MISC_FEATURE (8)..(8): X is E or K
  MISC_FEATURE (11)..(11): X is E or K
  MISC_FEATURE (12)..(12): X is R, D or K
  MISC_FEATURE (14)..(14): X is Q or K
  MISC_FEATURE (15)..(15): X is R, E or K
  MISC_FEATURE (17)..(17): X is I or S
  MISC_FEATURE (18)..(18): X is E or K
  MISC_FEATURE (19)..(19): X is L, D, E or K
  MISC_FEATURE (21)..(21): X is L, Q, E or K
  MISC_FEATURE (22)..(22): X is R or K
  MISC_FEATURE (24)..(24): X is N or D
  MISC_FEATURE (26)..(26): X is K, E or D
  MISC_FEATURE (27)..(27): X is S, R, E or T
  MISC_FEATURE (29)..(29): X is R, E or K
  MISC_FEATURE (30)..(30): X is E or K
  MISC_FEATURE (31)..(31): X is V, T, E or K
  MISC_FEATURE (33)..(33): X is E, D or R
  MISC_FEATURE (34)..(34): X is E, D, Q or R
  MISC_FEATURE (36)..(36): X is E, Y or R
  MISC_FEATURE (37)..(37): X is E, K or R
  MISC_FEATURE (38)..(38): X is I, D, L or R
  MISC_FEATURE (40)..(40): X is E, D, K or Q
  MISC_FEATURE (41)..(41): X is E, R or K
  MISC_FEATURE (42)..(42): X is V or A
  MISC_FEATURE (43)..(43): X is R, E, L or A
  MISC_FEATURE (44)..(44): X is R, E, or K
  MISC_FEATURE (45)..(45): X is R, E, N or K
  MISC_FEATURE (47)..(47): X is R, E, Q or K
  MISC_FEATURE (48)..(48): X is R, E,  or K
  MISC_FEATURE (49)..(49): X is R, Q or K
  MISC_FEATURE (51)..(51): X is D, N, or S
XXXXXAKXAIXXAXXAXXXAXXGXPXXAXXXAXXAXXXAXXXXXXAXXXGX

SEQ ID NO: 368 - protein, 50 aa, Artificial Sequence
  Synthetic
  MISC_FEATURE (2)..(2): X is E, R or K
  MISC_FEATURE (3)..(3): X is V or A
  MISC_FEATURE (20)..(20): X is E, K or Q
  MISC_FEATURE (23)..(23): X is N or D
  MISC_FEATURE (25)..(25): X is E or D
  MISC_FEATURE (26)..(26): X is E or S
  MISC_FEATURE (28)..(28): X is E, R, Y or K
  MISC_FEATURE (29)..(29): X is E, R, or K
  MISC_FEATURE (32)..(32): X is E, R, or D
  MISC_FEATURE (33)..(33): X is E, R, T or D
  MISC_FEATURE (35)..(35): X is E, R, Y or K
  MISC_FEATURE (36)..(36): X is E, R, Q or K
  MISC_FEATURE (37)..(37): X is I, V or L
  MISC_FEATURE (39)..(39): X is E, D, Q or R
  MISC_FEATURE (40)..(40): X is E or R
  MISC_FEATURE (41)..(41): X is V or A
  MISC_FEATURE (42)..(42): X is R, E or Y
  MISC_FEATURE (43)..(43): X is R, E or K
  MISC_FEATURE (44)..(44): X is L, E or Q
  MISC_FEATURE (46)..(46): X is R, E or Q
  MISC_FEATURE (47)..(47): X is R, E or K
  MISC_FEATURE (48)..(48): X is R, Q, N or D
  MISC_FEATURE (50)..(50): X is N or D
AXXLALVAIALALVAIALAXVGXPXXAXXVAXXAXXXAXXXXXXAXXXGX

SEQ ID NO: 369 - protein, 49 aa, Artificial Sequence
  Synthetic
  MISC_FEATURE (1)..(1): X is A, D, I or W
  MISC_FEATURE (2)..(2): X is R, D, E or K
  MISC_FEATURE (3)..(3): X is V or A
  MISC_FEATURE (5)..(5): X is K, E, R or Q
  MISC_FEATURE (9)..(9): X is K, E, or R
  MISC_FEATURE (12)..(12): X is K or E
  MISC_FEATURE (16)..(16): X is K or E
  MISC_FEATURE (19)..(19): X is K, Q or R
  MISC_FEATURE (20)..(20): X is K, Q, E or N
  MISC_FEATURE (23)..(23): X is D or N
  MISC_FEATURE (25)..(25): X is D or E
  MISC_FEATURE (26)..(26): X is S or E
  MISC_FEATURE (28)..(28): X is R, K, T or E
  MISC_FEATURE (29)..(29): X is R, K, S or E
  MISC_FEATURE (31)..(31): X is K, Q or E
  MISC_FEATURE (32)..(32): X is K, Q, R or E
  MISC_FEATURE (33)..(33): X is D, Q, R or E
  MISC_FEATURE (35)..(35): X is K, Q, R or E
  MISC_FEATURE (36)..(36): X is K, R or E
  MISC_FEATURE (37)..(37): X is I, V, T or L
  MISC_FEATURE (38)..(38): X is K, Q, E, or R
  MISC_FEATURE (39)..(39): X is K, D, E, or R
  MISC_FEATURE (40)..(40): X is K, D, E, or R
  MISC_FEATURE (41)..(41): X is V or A
  MISC_FEATURE (42)..(42): X is R, K, E or D
  MISC_FEATURE (43)..(43): X is R, K, E or Q
  MISC_FEATURE (44)..(44): X is L, E, I or N
  MISC_FEATURE (45)..(45): X is L, A or K
  MISC_FEATURE (46)..(46): X is E, R, T or K
  MISC_FEATURE (47)..(47): X is E, R, or K
  MISC_FEATURE (48)..(48): X is Q, N, R, or K
XXXLXLVAXALXLVAXALXXVGXPXXAXXVXXXAXXXXXXXXXXXXXXG

SEQ ID NO: 370 - protein, 51 aa, Artificial Sequence
  Synthetic
DAEEEAKEAIKRAQEAIELARKGNPEEARKVAEEARERAERVREEAEKRGD

SEQ ID NO: 371 - protein, 50 aa, Artificial Sequence
  Synthetic
AEVLALVAIALALVAIALAEVGNPEEAREVAERAKEIAERVRELAEKRGD

SEQ ID NO: 372 - protein, 49 aa, Artificial Sequence
  Synthetic
ARVLKLVAKALELVAEALKKVGNPEEAREVEERAREIKERVRRLLEEKG

SEQ ID NO: 373 - protein, 56 aa, Artificial Sequence
  Synthetic
  MISC_FEATURE (1)..(1): X is D or N
  MISC_FEATURE (2)..(2): X is S, T, D or N
  MISC_FEATURE (3)..(3): X is E, T, D or Q
  MISC_FEATURE (5)..(5): X is E, K, D or N
  MISC_FEATURE (6)..(6): X is E, K, or R
  MISC_FEATURE (7)..(7): X is I or L
  MISC_FEATURE (8)..(8): X is I, A or R
  MISC_FEATURE (9)..(9): X is K, E or D
  MISC_FEATURE (10)..(10): X is K, R or Q
  MISC_FEATURE (12)..(12): X is K, E or Q
  MISC_FEATURE (13)..(13): X is K, E or R
  MISC_FEATURE (14)..(14): X is A, E, L or Q
  MISC_FEATURE (16)..(16): X is K, E, or D
  MISC_FEATURE (17)..(17): X is K, E, or R
  MISC_FEATURE (18)..(18): X is V, I or L
  MISC_FEATURE (19)..(19): X is K, E or Q
  MISC_FEATURE (20)..(20): X is K, E, R or Q
  MISC_FEATURE (21)..(21): X is K, E, N or Q
  MISC_FEATURE (23)..(23): X is K, E, N or R
  MISC_FEATURE (24)..(24): X is K, E, D or R
  MISC_FEATURE (25)..(25): X is S, E, D or R
  MISC_FEATURE (26)..(26): X is N or T
  MISC_FEATURE (27)..(27): X is N or D
  MISC_FEATURE (28)..(28): X is S, P, Q or D
  MISC_FEATURE (29)..(29): X is E, T or D
  MISC_FEATURE (30)..(30): X is E, K, L or Q
  MISC_FEATURE (31)..(31): X is R, I or Q
  MISC_FEATURE (32)..(32): X is E, K or D
  MISC_FEATURE (35)..(35): X is K or Q
  MISC_FEATURE (36)..(36): X is R, K or L
  MISC_FEATURE (41)..(41): X is A or L
  MISC_FEATURE (42)..(42): X is K, Q, E, or R
  MISC_FEATURE (43)..(43): X is I or R
  MISC_FEATURE (46)..(46): X is E, D, K or R
  MISC_FEATURE (48)..(48): X is V or A
  MISC_FEATURE (49)..(49): X is K, Q, D, or E
  MISC_FEATURE (50)..(50): X is K, R, I or E
  MISC_FEATURE (52)..(52): X is Q, E, A or R
  MISC_FEATURE (53)..(53): X is Q, K, D or E
  MISC_FEATURE (54)..(54): X is S, T, Q or A
XXXAXXXXXXLXXXIXXXXXXAXXXXXXXXXXLLXXLAEAXXXAAXAXXXAXXXGD

SEQ ID NO: 374 - protein, 55 aa, Artificial Sequence
  Synthetic
  MISC_FEATURE (1)..(1): X is S, D, Q or E
  MISC_FEATURE (2)..(2): X is R, Q or E
  MISC_FEATURE (4)..(4): X is I or L
  MISC_FEATURE (5)..(5): X is R, K, E, or D
  MISC_FEATURE (6)..(6): X is I or L
  MISC_FEATURE (8)..(8): X is R or K
  MISC_FEATURE (9)..(9): X is E, Q, S or K
  MISC_FEATURE (11)..(11): X is V or A
  MISC_FEATURE (12)..(12): X is K, E, H or R
  MISC_FEATURE (13)..(13): X is E, A, D or L
  MISC_FEATURE (15)..(15): X is T, I or L
  MISC_FEATURE (16)..(16): X is K, E, or R
  MISC_FEATURE (17)..(17): X is V, I or L
  MISC_FEATURE (18)..(18): X is V, I or A
  MISC_FEATURE (19)..(19): X is R, E, K or Q
  MISC_FEATURE (20)..(20): X is R or E
  MISC_FEATURE (22)..(22): X is D, T, R or E
  MISC_FEATURE (23)..(23): X is R or K
  MISC_FEATURE (24)..(24): X is S, E, A or Q
  MISC_FEATURE (27)..(27): X is K, E, P or Q
  MISC_FEATURE (28)..(28): X is D, E, or N
  MISC_FEATURE (29)..(29): X is R, E, or K
  MISC_FEATURE (31)..(31): X is R, E, H or K
  MISC_FEATURE (34)..(34): X is I or V
  MISC_FEATURE (35)..(35): X is R, K D, or L
  MISC_FEATURE (40)..(40): X is A or L
  MISC_FEATURE (47)..(47): X is A or V
  MISC_FEATURE (49)..(49): X is D, K, R or E
  MISC_FEATURE (52)..(52): X is Q, K or E
  MISC_FEATURE (53)..(53): X is S, T, A or K
  MISC_FEATURE (55)..(55): X is D or N
XXAXXXIXXLXXXIXXXXXXAXXXTDXXXIXLLXXLAEAXARAAEAXAXAAXXGX

SEQ ID NO: 375 - protein, 54 aa, Artificial Sequence
  Synthetic
  MISC_FEATURE (1)..(1): X is Q, E, or D
  MISC_FEATURE (2)..(2): X is S, E, or D
  MISC_FEATURE (4)..(4): X is I or L
  MISC_FEATURE (5)..(5): X is K, E, D or R
  MISC_FEATURE (6)..(6): X is K, T or R
  MISC_FEATURE (8)..(8): X is K or E
  MISC_FEATURE (9)..(9): X is Q, R, K or E
  MISC_FEATURE (11)..(11): X is V or A
  MISC_FEATURE (12)..(12): X is K, E, or R
  MISC_FEATURE (13)..(13): X is K, N, or R
  MISC_FEATURE (15)..(15): X is I, L or S
  MISC_FEATURE (16)..(16): X is K, E, or Q
  MISC_FEATURE (17)..(17): X is V, I,  L or K
  MISC_FEATURE (18)..(18): X is V, I,  or A
  MISC_FEATURE (19)..(19): X is R, E, K or Q
  MISC_FEATURE (20)..(20): X is R, E, K or Q
  MISC_FEATURE (22)..(22): X is R, E, K or N
  MISC_FEATURE (23)..(23): X is R, E, K or N
  MISC_FEATURE (24)..(24): X is S, E, K or A
  MISC_FEATURE (25)..(25): X is T or N
  MISC_FEATURE (26)..(26): X is D or N
  MISC_FEATURE (27)..(27): X is K, E, P or Q
  MISC_FEATURE (28)..(28): X is K, E, T or D
  MISC_FEATURE (29)..(29): X is K, E, R or Q
  MISC_FEATURE (31)..(31): X is K, E, or R
  MISC_FEATURE (32)..(32): X is K or E
  MISC_FEATURE (33)..(33): X is K, L or R
  MISC_FEATURE (34)..(34): X is I or V
  MISC_FEATURE (35)..(35): X is R, E,K or Q
  MISC_FEATURE (36)..(36): X is K or E
  MISC_FEATURE (38)..(38): X is K, Q or E
  MISC_FEATURE (39)..(39): X is K, D or E
  MISC_FEATURE (40)..(40): X is L or A
  MISC_FEATURE (42)..(42): X is R, D, or K
  MISC_FEATURE (43)..(43): X is R, E, or K
  MISC_FEATURE (46)..(46): X is Q, E, R or N
  MISC_FEATURE (47)..(47): X is I, A, E, or L
  MISC_FEATURE (49)..(49): X is E, K or R
  MISC_FEATURE (50)..(50): X is D, K or R
  MISC_FEATURE (52)..(52): X is E, Q, K or R
  MISC_FEATURE (53)..(53): X is E, D, K or R
XXAXXXIXXLXXXIXXXXXXAXXXXXXXXIXXXXXXAXXXAXXAEXXAXXAXXG

SEQ ID NO: 376 - protein, 56 aa, Artificial Sequence
  Synthetic
DSEADRIIKKLQKEIKEVEQEARDSNDDEERELLKRLAEALKRAAEAVKRAQESGD

SEQ ID NO: 377 - protein, 55 aa, Artificial Sequence
  Synthetic
SEAIRIIKKLVKEITEVVREARKSTDKEEIELLIRLAEALARAAEAVADAAKSGD

SEQ ID NO: 378 - protein, 54 aa, Artificial Sequence
  Synthetic
QEAIKRIKKLVKKIIEVVRKARKSTNKKEIEKLIRKAEKLARKAEQIAEDAKRG

SEQ ID NO: 379 - protein, 52 aa, Artificial Sequence
  Synthetic
  MISC_FEATURE (1)..(1): X is D or N
  MISC_FEATURE (2)..(2): X is S, T, D or N
  MISC_FEATURE (3)..(3): X is E, T, D or K
  MISC_FEATURE (4)..(4): X is E, S or K
  MISC_FEATURE (5)..(5): X is E, D or K
  MISC_FEATURE (6)..(6): X is E, R, T or K
  MISC_FEATURE (8)..(8): X is R, T or K
  MISC_FEATURE (9)..(9): X is R, H, E or K
  MISC_FEATURE (10)..(10): X is R, L, E or K
  MISC_FEATURE (12)..(12): X is N, E or K
  MISC_FEATURE (13)..(13): X is R, E or K
  MISC_FEATURE (15)..(15): X is Q, I or K
  MISC_FEATURE (16)..(16): X is D, E or K
  MISC_FEATURE (17)..(17): X is V, L, T or I
  MISC_FEATURE (19)..(19): X is S, K, E or Q
  MISC_FEATURE (20)..(20): X is R, K, E or Q
  MISC_FEATURE (21)..(21): X is V or A
  MISC_FEATURE (22)..(22): X is E, L, K or R
  MISC_FEATURE (23)..(23): X is E, K or R
  MISC_FEATURE (24)..(24): X is E, L or R
  MISC_FEATURE (26)..(26): X is D, K, Q or R
  MISC_FEATURE (27)..(27): X is E, K, Q or R
  MISC_FEATURE (28)..(28): X is E, T, D, or  Q
  MISC_FEATURE (31)..(31): X is E, R, D, or  S
  MISC_FEATURE (32)..(32): X is E, D or K
  MISC_FEATURE (34)..(34): X is E, I, A or K
  MISC_FEATURE (35)..(35): X is E, Q, N or K
  MISC_FEATURE (38)..(38): X is E, Q, R or K
  MISC_FEATURE (39)..(39): X is E, Q, R or K
  MISC_FEATURE (41)..(41): X is E, R or A
  MISC_FEATURE (42)..(42): X is E, R or K
  MISC_FEATURE (43)..(43): X is E, R, Q or L
  MISC_FEATURE (45)..(45): X is E or K
  MISC_FEATURE (46)..(46): X is Q, R, E or K
  MISC_FEATURE (48)..(48): X is S or A
  MISC_FEATURE (49)..(49): X is Q, K, E or R
  MISC_FEATURE (50)..(50): X is K, E or R
  MISC_FEATURE (52)..(52): X is D or N
XXXXXXAXXXAXXAXXXAXXXXXXAXXXGSXXLXXIAXXLXXXAXXAXXXGX

SEQ ID NO: 380 - protein, 51 aa, Artificial Sequence
  Synthetic
  MISC_FEATURE (1)..(1): X is S, A, P or E
  MISC_FEATURE (2)..(2): X is K, D, S, or E
  MISC_FEATURE (3)..(3): X is K, A or R
  MISC_FEATURE (5)..(5): X is K, E, D or L
  MISC_FEATURE (7)..(7): X is I or V
  MISC_FEATURE (8)..(8): X is L, A, K or R
  MISC_FEATURE (9)..(9): X is L, E, K or R
  MISC_FEATURE (12)..(12): X is L, E, K or D
  MISC_FEATURE (15)..(15): X is L, A, K or R
  MISC_FEATURE (16)..(16): X is V, I, T or L
  MISC_FEATURE (18)..(18): X is V, I, or A
  MISC_FEATURE (19)..(19): X is E, Q or R
  MISC_FEATURE (20)..(20): X is V or A
  MISC_FEATURE (22)..(22): X is E, R, or K
  MISC_FEATURE (23)..(23): X is E, R, L or K
  MISC_FEATURE (25)..(25): X is H, R, or K
  MISC_FEATURE (26)..(26): X is E, Q, R, or K
  MISC_FEATURE (27)..(27): X is E, Q, or N
  MISC_FEATURE (30)..(30): X is E, D, or S
  MISC_FEATURE (31)..(31): X is E, D, K or T
  MISC_FEATURE (33)..(33): X is R, K or Q
  MISC_FEATURE (34)..(34): X is E, N, K or Q
  MISC_FEATURE (37)..(37): X is E, R, K or Q
  MISC_FEATURE (38)..(38): X is E, R, K or Q
  MISC_FEATURE (41)..(41): X is E, R, or K
  MISC_FEATURE (42)..(42): X is E or L
  MISC_FEATURE (45)..(45): X is R, K, E or Q
  MISC_FEATURE (48)..(48): X is R, K, or Q
  MISC_FEATURE (49)..(49): X is R or E
XXXAXAXXXAAXAVXXAXXXYXXAXXXGSXXLXXIAXXLAXXALXAAXXGD

SEQ ID NO: 381 - protein, 50 aa, Artificial Sequence
  Synthetic
  MISC_FEATURE (1)..(1): X is S, A, P or E
  MISC_FEATURE (2)..(2): X is D, K, S or E
  MISC_FEATURE (3)..(3): X is K or R
  MISC_FEATURE (5)..(5): X is R, D, Q or E
  MISC_FEATURE (7)..(7): X is I or V
  MISC_FEATURE (8)..(8): X is L, A, K or R
  MISC_FEATURE (9)..(9): X is Q, E, K or R
  MISC_FEATURE (12)..(12): X is Q, E, K or R
  MISC_FEATURE (13)..(13): X is A, E, K or R
  MISC_FEATURE (15)..(15): X is A, L, K or R
  MISC_FEATURE (16)..(16): X is E, Q, K or R
  MISC_FEATURE (18)..(18): X is V, I or A
  MISC_FEATURE (19)..(19): X is E, Q, R or K
  MISC_FEATURE (20)..(20): X is E, Q, N or K
  MISC_FEATURE (22)..(22): X is E, S, A or K
  MISC_FEATURE (23)..(23): X is E, R, T or K
  MISC_FEATURE (25)..(25): X is K, R, D, or S
  MISC_FEATURE (26)..(26): X is K,E or  R
  MISC_FEATURE (27)..(27): X is K,E or  R
  MISC_FEATURE (29)..(29): X is D or S
  MISC_FEATURE (30)..(30): X is D, E or S
  MISC_FEATURE (31)..(31): X is D or E
  MISC_FEATURE (32)..(32): X is K, D, R or E
  MISC_FEATURE (33)..(33): X is A, Q, R or E
  MISC_FEATURE (34)..(34): X is K, Q, R or E
  MISC_FEATURE (35)..(35): X is K, R or E
  MISC_FEATURE (37)..(37): X is K, R, N or E
  MISC_FEATURE (38)..(38): X is K, R, D or E
  MISC_FEATURE (39)..(39): X is K, R or E
  MISC_FEATURE (41)..(41): X is K, R or E
  MISC_FEATURE (42)..(42): X is K, Q or E
  MISC_FEATURE (45)..(45): X is K, R or E
  MISC_FEATURE (46)..(46): X is K, R or E
  MISC_FEATURE (48)..(48): X is K, R or Q
  MISC_FEATURE (49)..(49): X is E or R
XXXAXAXXXAAXXVXXAXXXYXXAXXXGXXXXXXXAXXXAXXALXXAXXG

SEQ ID NO: 382 - protein, 52 aa, Artificial Sequence
  Synthetic
DSEKEKATELAERAQDVASRVEEEARREGSRELIEIARELRERAEEASQEGD

SEQ ID NO: 383 - protein, 51 aa, Artificial Sequence
  Synthetic
SEKAKAILLAAKAVLVAVEVYERAKRQGSDELREIARELAKEALRAAQEGD

SEQ ID NO: 384 - protein, 50 aa, Artificial Sequence
  Synthetic
SEKARAILEAAREVLRAVEQYERAKRRGDDDERERAREEAREALERAREG

SEQ ID NO: 385 - protein, 56 aa, Artificial Sequence
  Synthetic
  MISC_FEATURE (1)..(1): X is N, D, or S
  MISC_FEATURE (2)..(2): X is P, N, D, or S
  MISC_FEATURE (3)..(3): X is E, K, D or R
  MISC_FEATURE (4)..(4): X is L, T or R
  MISC_FEATURE (5)..(5): X is E, K or Q
  MISC_FEATURE (6)..(6): X is E or K
  MISC_FEATURE (7)..(7): X is W or A
  MISC_FEATURE (8)..(8): X is I, D or K
  MISC_FEATURE (9)..(9): X is R, D or K
  MISC_FEATURE (10)..(10): X is R, E or K
  MISC_FEATURE (12)..(12): X is Q, N, E or K
  MISC_FEATURE (13)..(13): X is Q, R, E or K
  MISC_FEATURE (14)..(14): X is V or A
  MISC_FEATURE (16)..(16): X is K, E, D, or N
  MISC_FEATURE (17)..(17): X is K, E, or  D
  MISC_FEATURE (18)..(18): X is V or A
  MISC_FEATURE (19)..(19): X is E, K, Q or R
  MISC_FEATURE (20)..(20): X is E or K
  MISC_FEATURE (21)..(21): X is V, L, Q or A
  MISC_FEATURE (23)..(23): X is K, E or Q
  MISC_FEATURE (24)..(24): X is K, or R
  MISC_FEATURE (25)..(25): X is A or L
  MISC_FEATURE (26)..(26): X is E, K, Q or R
  MISC_FEATURE (27)..(27): X is E, K, N or R
  MISC_FEATURE (28)..(28): X is E, S, N or Q
  MISC_FEATURE (30)..(30): X is D or N
  MISC_FEATURE (31)..(31): X is P, D or E
  MISC_FEATURE (32)..(32): X is K, D or E
  MISC_FEATURE (34)..(34): X is R, A or T
  MISC_FEATURE (35)..(35): X is D, R, E or N
  MISC_FEATURE (36)..(36): X is S, A, L or I
  MISC_FEATURE (38)..(38): X is K, E, R or N
  MISC_FEATURE (39)..(39): X is K, E, or R
  MISC_FEATURE (41)..(41): X is K, V, I, or R
  MISC_FEATURE (42)..(42): X is K, E, D or R
  MISC_FEATURE (44)..(44): X is V or I
  MISC_FEATURE (45)..(45): X is E, Q, K or R
  MISC_FEATURE (46)..(46): X is E or R
  MISC_FEATURE (49)..(49): X is E, K or R
  MISC_FEATURE (50)..(50): X is E, Q or R
  MISC_FEATURE (52)..(52): X is K, S, Q or R
  MISC_FEATURE (53)..(53): X is K, E, N or R
  MISC_FEATURE (54)..(54): X is Q, E or R
  MISC_FEATURE (56)..(56): X is N, D, or S
XXXXXXXXXXAXXXAXXXXXXAXXXXXXGXXXLXXXAXXLXXAXXXAIXXAXXXGX

SEQ ID NO: 386 - protein, 55 aa, Artificial Sequence
  Synthetic
  MISC_FEATURE (1)..(1): X is P, W, A, or S
  MISC_FEATURE (2)..(2): X is E, K, R or D
  MISC_FEATURE (4)..(4): X is V or A
  MISC_FEATURE (5)..(5): X is K, E or R
  MISC_FEATURE (6)..(6): X is W or A
  MISC_FEATURE (9)..(9): X is R, E, or K
  MISC_FEATURE (12)..(12): X is R, E, Q or K
  MISC_FEATURE (13)..(13): X is V or A
  MISC_FEATURE (15)..(15): X is V or A
  MISC_FEATURE (16)..(16): X is E, K, L or R
  MISC_FEATURE (17)..(17): X is V or A
  MISC_FEATURE (18)..(18): X is V or A
  MISC_FEATURE (18)..(18): X is I or L
  MISC_FEATURE (19)..(19): X is K, E, R or Q
  MISC_FEATURE (20)..(20): X is V, L, Q or R
  MISC_FEATURE (22)..(22): X is I, E or L
  MISC_FEATURE (23)..(23): X is Q, K, E or R
  MISC_FEATURE (24)..(24): X is A or L
  MISC_FEATURE (25)..(25): X is Q, K, E or A
  MISC_FEATURE (26)..(26): X is K or N
  MISC_FEATURE (27)..(27): X is E, D, S or N
  MISC_FEATURE (30)..(30): X is R, P, E or K
  MISC_FEATURE (31)..(31): X is D, K, E or T
  MISC_FEATURE (33)..(33): X is F, A, or R
  MISC_FEATURE (34)..(34): X is R, K, E or D
  MISC_FEATURE (35)..(35): X is A, L or V
  MISC_FEATURE (37)..(37): X is A, L, I or R
  MISC_FEATURE (38)..(38): X is E, K or R
  MISC_FEATURE (41)..(41): X is E, K or R
  MISC_FEATURE (43)..(43): X is V or I
  MISC_FEATURE (45)..(45): X is E, R or K
  MISC_FEATURE (48)..(48): X is E, R or K
  MISC_FEATURE (49)..(49): X is E, R or K
  MISC_FEATURE (51)..(51): X is V or A
  MISC_FEATURE (52)..(52): X is K, D or E
  MISC_FEATURE (53)..(53): X is K or Q
  MISC_FEATURE (55)..(55): X is N, D, or S
XXLXXXVAXAAXXAXXXXXXAXXXXXXGNXXLXXXAXXLVXAXIXAIXXAXXXGX

SEQ ID NO: 387 - protein, 54 aa, Artificial Sequence
  Synthetic
  MISC_FEATURE (1)..(1): X is P, W, or A
  MISC_FEATURE (2)..(2): X is E, K or D
  MISC_FEATURE (4)..(4): X is V or A
  MISC_FEATURE (5)..(5): X is E, K, Q or R
  MISC_FEATURE (6)..(6): X is E, K, T or R
  MISC_FEATURE (9)..(9): X is E, K, D or R
  MISC_FEATURE (10)..(10): X is E, K, L or R
  MISC_FEATURE (12)..(12): X is E, K, or R
  MISC_FEATURE (13)..(13): X is E, K, or Q
  MISC_FEATURE (15)..(15): X is A or V
  MISC_FEATURE (16)..(16): X is E, K or Q
  MISC_FEATURE (17)..(17): X is L, A, V or E
  MISC_FEATURE (18)..(18): X is L or I
  MISC_FEATURE (19)..(19): X is K, E or Q
  MISC_FEATURE (20)..(20): X is K, E, H or R
  MISC_FEATURE (22)..(22): X is I, E or L
  MISC_FEATURE (23)..(23): X is R, E or K
  MISC_FEATURE (24)..(24): X is A, D or L
  MISC_FEATURE (25)..(25): X is E, K, Q or H
  MISC_FEATURE (26)..(26): X is R, K, Q or N
  MISC_FEATURE (27)..(27): X is R, K, E or N
  MISC_FEATURE (29)..(29): X is D or N
  MISC_FEATURE (30)..(30): X is R, P, E, or K
  MISC_FEATURE (31)..(31): X is D, E, or K
  MISC_FEATURE (32)..(32): X is D, E, R or K
  MISC_FEATURE (33)..(33): X is R, A or T
  MISC_FEATURE (34)..(34): X is R, E,K or D
  MISC_FEATURE (35)..(35): X is R, E, or K
  MISC_FEATURE (36)..(36): X is A or N
  MISC_FEATURE (37)..(37): X is L, E, A or K
  MISC_FEATURE (38)..(38): X is E, R or K
  MISC_FEATURE (39)..(39): X is E, R, T or K
  MISC_FEATURE (41)..(41): X is E, R, D or K
  MISC_FEATURE (42)..(42): X is E, N or K
  MISC_FEATURE (43)..(43): X is V or I
  MISC_FEATURE (45)..(45): X is E, K, R or Q
  MISC_FEATURE (46)..(46): X is E, K, R or T
  MISC_FEATURE (48)..(48): X is E or K
  MISC_FEATURE (49)..(49): X is E or K
  MISC_FEATURE (50)..(50): X is L, A or S
  MISC_FEATURE (51)..(51): X is A or V
  MISC_FEATURE (52)..(52): X is R, K, D or S
  MISC_FEATURE (53)..(53): X is Q, E, R, or K
XXLXXXVAXXAXXAXXXXXXAXXXXXXGXXXXXXXXXXXVXXXIXXIXXXXXXG

SEQ ID NO: 388 - protein, 56 aa, Artificial Sequence
  Synthetic
NPELEEWIRRAKEVAKEVEKVAQRAEEEGNPDLRDSAKELRRAVEEAIEEAKKQGN

SEQ ID NO: 389 - protein, 55 aa, Artificial Sequence
  Synthetic
PELVEWVARAAKVAAEVIKVAIQAEKEGNRDLFRAALELVRAVIEAIEEAVKQGN

SEQ ID NO: 390 - protein, 54 aa, Artificial Sequence
  Synthetic
PELVERVARLAKKAAELIKRAIRAEKEGNRDERREALERVREVIERIEELVRQG

SEQ ID NO: 391 - protein, 52 aa, Artificial Sequence
  Synthetic
  MISC_FEATURE (1)..(1): X is N or D
  MISC_FEATURE (2)..(2): X is S or T
  MISC_FEATURE (3)..(3): X is D, E or R
  MISC_FEATURE (4)..(4): X is D, E or K
  MISC_FEATURE (5)..(5): X is D, E, Q or K
  MISC_FEATURE (6)..(6): X is K, E or N
  MISC_FEATURE (8)..(8): X is K, R or Q
  MISC_FEATURE (9)..(9): X is K, R, E or Q
  MISC_FEATURE (10)..(10): X is W or A
  MISC_FEATURE (11)..(11): X is V or A
  MISC_FEATURE (12)..(12): X is E, D, R or K
  MISC_FEATURE (13)..(13): X is E, R or K
  MISC_FEATURE (15)..(16): X is E, R or K
  MISC_FEATURE (17)..(17): X is A or L
  MISC_FEATURE (19)..(19): X is K, Q, R, or D
  MISC_FEATURE (20)..(20): X is K, E or R
  MISC_FEATURE (22)..(22): X is K, E or L
  MISC_FEATURE (23)..(23): X is K or E
  MISC_FEATURE (24)..(24): X is K, Q, L or E
  MISC_FEATURE (26)..(26): X is K, Q, R or E
  MISC_FEATURE (27)..(27): X is K or R
  MISC_FEATURE (28)..(28): X is E, Q or R
  MISC_FEATURE (31)..(31): X is E or D
  MISC_FEATURE (32)..(32): X is R, Q, E or D
  MISC_FEATURE (34)..(34): X is R, I, L or E
  MISC_FEATURE (35)..(35): X is R, K or E
  MISC_FEATURE (36)..(36): X is V or L
  MISC_FEATURE (38)..(38): X is E, K, D, or Q
  MISC_FEATURE (39)..(39): X is E, R or Q
  MISC_FEATURE (41)..(41): X is E, R or L
  MISC_FEATURE (42)..(42): X is E, R or K
  MISC_FEATURE (43)..(43): X is E, R, Q or L
  MISC_FEATURE (45)..(45): X is E, R, K or D
  MISC_FEATURE (46)..(46): X is E or K
  MISC_FEATURE (48)..(48): X is R, A, E or K
  MISC_FEATURE (49)..(49): X is R, E or K
  MISC_FEATURE (50)..(50): X is N or K
  MISC_FEATURE (51)..(51): X is N, H, Q or K
  MISC_FEATURE (52)..(52): X is N, D or S
XXXXXXAXXXXXXAXXXAXXAXXXAXXXGDXXAXXXAXXLXXXAXXAXXXXX

SEQ ID NO: 392 - protein, 51 aa, Artificial Sequence
  Synthetic
  MISC_FEATURE (1)..(1): X is S A, R, or Q
  MISC_FEATURE (2)..(2): X is E,D, K or S
  MISC_FEATURE (3)..(3): X is E, L or T
  MISC_FEATURE (5)..(5): X is E, A, K or Q
  MISC_FEATURE (8)..(8): X is Y or A
  MISC_FEATURE (9)..(9): X is W or A
  MISC_FEATURE (10)..(10): X is V or A
  MISC_FEATURE (12)..(12): X is R, L, E, or K
  MISC_FEATURE (14)..(14): X is V, A, or I
  MISC_FEATURE (15)..(15): X is A or L
  MISC_FEATURE (16)..(16): X is A or L
  MISC_FEATURE (19)..(19): X is E, K, Q or R
  MISC_FEATURE (22)..(22): X is E or L
  MISC_FEATURE (23)..(23): X is Q or L
  MISC_FEATURE (25)..(25): X is Q or K
  MISC_FEATURE (26)..(26): X is R or E
  MISC_FEATURE (27)..(27): X is Q or E
  MISC_FEATURE (30)..(30): X is D or E
  MISC_FEATURE (31)..(31): X is D, Q or K
  MISC_FEATURE (33)..(33): X is R, I, Q or E
  MISC_FEATURE (34)..(34): X is R, E or K
  MISC_FEATURE (35)..(35): X is V or L
  MISC_FEATURE (37)..(37): X is E, R, K or Q
  MISC_FEATURE (38)..(38): X is E, R, or K
  MISC_FEATURE (41)..(41): X is E, R, or K
  MISC_FEATURE (42)..(42): X is Q or L
  MISC_FEATURE (44)..(44): X is E or R
  MISC_FEATURE (45)..(45): X is E or K
  MISC_FEATURE (47)..(47): X is A or L
  MISC_FEATURE (48)..(48): X is R, E or K
  MISC_FEATURE (49)..(49): X is N or K
  MISC_FEATURE (50)..(50): X is N or K
  MISC_FEATURE (51)..(51): X is N or D
XXXAXAVXXXAXAXXXALXALXXAXXXGDXXAXXXAXXLLXXAXXAXXXXX

SEQ ID NO: 393 - protein, 50 aa, Artificial Sequence
  Synthetic
  MISC_FEATURE (1)..(1): X is P, K, A or E
  MISC_FEATURE (2)..(2): X is S, K, D or E
  MISC_FEATURE (3)..(3): X is E, T, D or Q
  MISC_FEATURE (5)..(5): X is E, R, D or N
  MISC_FEATURE (8)..(8): X is Y or A
  MISC_FEATURE (9)..(9): X is E, K, R or D
  MISC_FEATURE (10)..(10): X is A or V
  MISC_FEATURE (12)..(12): X is R, E or K
  MISC_FEATURE (13)..(13): X is D, A, E or K
  MISC_FEATURE (14)..(14): X is V, A or I
  MISC_FEATURE (15)..(15): X is L, Y, A or K
  MISC_FEATURE (16)..(16): X is E, R, or K
  MISC_FEATURE (19)..(19): X is Q, E, R, or K
  MISC_FEATURE (20)..(20): X is E, R, or K
  MISC_FEATURE (21)..(21): X is L or Y
  MISC_FEATURE (22)..(22): X is E, H, I or K
  MISC_FEATURE (23)..(23): X is E, Q, R or K
  MISC_FEATURE (25)..(25): X is E, R or K
  MISC_FEATURE (26)..(26): X is R or K
  MISC_FEATURE (27)..(27): X is R, E, D,  or K
  MISC_FEATURE (29)..(29): X is D or N
  MISC_FEATURE (30)..(30): X is E, D, K or Q
  MISC_FEATURE (31)..(31): X is E, D, or K
  MISC_FEATURE (32)..(32): X is A, E, D, or K
  MISC_FEATURE (33)..(33): X is R, Q, I, or K
  MISC_FEATURE (34)..(34): X is R, Q, E, or K
  MISC_FEATURE (35)..(35): X is R, S, E, or K
  MISC_FEATURE (37)..(37): X is R, E, or K
  MISC_FEATURE (38)..(38): X is R, E, D or K
  MISC_FEATURE (39)..(39): X is R, E, N or K
  MISC_FEATURE (41)..(41): X is R, E, or K
  MISC_FEATURE (42)..(42): X is Q, R, E, or K
  MISC_FEATURE (44)..(44): X is R, E, or K
  MISC_FEATURE (45)..(45): X is R, E, or K
  MISC_FEATURE (46)..(46): X is R, A, N, or K
  MISC_FEATURE (47)..(47): X is A or Q
  MISC_FEATURE (48)..(48): X is R, E, D or K
  MISC_FEATURE (49)..(49): X is R, N or K
  MISC_FEATURE (50)..(50): X is E, H, N or K
XXXAXAVXXXAXXXXXALXXXXXAXXXGXXXXXXXAXXXLXXAXXXXXXX

SEQ ID NO: 394 - protein, 52 aa, Artificial Sequence
  Synthetic
NSDEEEAREWAERAEEAAKEALEQAKREGDEDARRVAEELEKQAEEARRKKD

SEQ ID NO: 395 - protein, 51 aa, Artificial Sequence
  Synthetic
SEEAEAVYWAARAVLAALEALEQAKREGDEDARRVAEELLRQAEEAARKKN

SEQ ID NO: 396 - protein, 50 aa, Artificial Sequence
  Synthetic
PEEARAVYEAARDVLEALQRLEEAKRRGDEEERREAEERLRQAEERARKK

SEQ ID NO: 397 - protein, 57 aa, Artificial Sequence
  Synthetic
  MISC_FEATURE (1)..(1): X is S, N or D
  MISC_FEATURE (2)..(2): X is S, N, T or D
  MISC_FEATURE (3)..(3): X is E or D
  MISC_FEATURE (4)..(4): X is E, K or D
  MISC_FEATURE (5)..(5): X is E, K or D
  MISC_FEATURE (6)..(6): X is E, K, T or R
  MISC_FEATURE (8)..(8): X is E, K, or R
  MISC_FEATURE (9)..(9): X is E, K, or R
  MISC_FEATURE (10)..(10): X is E, A, L or R
  MISC_FEATURE (11)..(11): X is I, T or K
  MISC_FEATURE (12)..(12): X is R, E or K
  MISC_FEATURE (13)..(13): X is R, E or K
  MISC_FEATURE (15)..(15): X is Q, E or K
  MISC_FEATURE (16)..(16): X is R, E or K
  MISC_FEATURE (18)..(18): X is A or S
  MISC_FEATURE (19)..(19): X is E, K, R or D
  MISC_FEATURE (20)..(20): X is E, K, R or L
  MISC_FEATURE (22)..(22): X is E, K, N or Q
  MISC_FEATURE (23)..(23): X is E, K, or R
  MISC_FEATURE (26)..(26): X is E, K, N or R
  MISC_FEATURE (27)..(27): X is E, K, N or R
  MISC_FEATURE (28)..(28): X is T or A
  MISC_FEATURE (32)..(32): X is R, K, N or T
  MISC_FEATURE (33)..(33): X is V or A
  MISC_FEATURE (34)..(34): X is R, I or K
  MISC_FEATURE (35)..(35): X is E or K
  MISC_FEATURE (38)..(38): X is E, R or K
  MISC_FEATURE (39)..(39): X is E, R or K
  MISC_FEATURE (41)..(41): X is S, V, R or K
  MISC_FEATURE (42)..(42): X is E, R or D
  MISC_FEATURE (45)..(45): X is E, R, Q or K
  MISC_FEATURE (46)..(46): X is E, R, N or K
  MISC_FEATURE (49)..(49): X is E, R, or K
  MISC_FEATURE (50)..(50): X is E, R, Q, or D
  MISC_FEATURE (52)..(52): X is E, Q, or K
  MISC_FEATURE (53)..(53): X is R or K
  MISC_FEATURE (56)..(56): X is S, R or T
  MISC_FEATURE (57)..(57): X is S, N or D
XXXXXXAXXXXXXAXXAXXXAXXAAXXXGDPXXXXLAXXLXXLAXXAAXXVXXDPXX

SEQ ID NO: 398 - protein, 56 aa, Artificial Sequence
  Synthetic
  MISC_FEATURE (1)..(1): X is S, D, K or E
  MISC_FEATURE (2)..(2): X is D or N
  MISC_FEATURE (3)..(3): X is V or A
  MISC_FEATURE (4)..(4): X is N, V, or R
  MISC_FEATURE (5)..(5): X is E, K or R
  MISC_FEATURE (7)..(7): X is L or A
  MISC_FEATURE (8)..(8): X is K, E or D
  MISC_FEATURE (9)..(9): X is L or R
  MISC_FEATURE (10)..(10): X is I or V
  MISC_FEATURE (11)..(11): X is I, L or V
  MISC_FEATURE (12)..(12): X is E, K or R
  MISC_FEATURE (15)..(15): X is E or K
  MISC_FEATURE (19)..(19): X is E, A, R or K
  MISC_FEATURE (22)..(22): X is E or K
  MISC_FEATURE (25)..(25): X is E, I, N or K
  MISC_FEATURE (26)..(26): X is R, Q or K
  MISC_FEATURE (27)..(27): X is T or V
  MISC_FEATURE (31)..(31): X is E, K, R or N
  MISC_FEATURE (32)..(32): X is V or A
  MISC_FEATURE (33)..(33): X is R or I
  MISC_FEATURE (34)..(34): X is E or K
  MISC_FEATURE (37)..(37): X is R, A or V
  MISC_FEATURE (38)..(38): X is R, E or K
  MISC_FEATURE (41)..(41): X is R, E or Q
  MISC_FEATURE (45)..(45): X is R, E or K
  MISC_FEATURE (48)..(48): X is E or K
  MISC_FEATURE (49)..(49): X is E, R, N or K
  MISC_FEATURE (51)..(51): X is Q, W, L or D
  MISC_FEATURE (52)..(52): X is R, E or K
  MISC_FEATURE (53)..(53): X is N or D
  MISC_FEATURE (55)..(55): X is S, R or K
  MISC_FEATURE (56)..(56): X is S, D or N
XXXXXAXXXXXXAIXAAVXALXAAXXXGDPXXXXLAXXLVXLAVXAAXXVXXXPXX

SEQ ID NO: 399 - protein, 55 aa, Artificial Sequence
  Synthetic
  MISC_FEATURE (1)..(1): X is E, D, K or Q
  MISC_FEATURE (2)..(2): X is E, D, or S
  MISC_FEATURE (3)..(3): X is V, A or S
  MISC_FEATURE (4)..(4): X is V, A or N
  MISC_FEATURE (5)..(5): X is E, R, D or K
  MISC_FEATURE (7)..(7): X is L or A
  MISC_FEATURE (8)..(8): X is K or E
  MISC_FEATURE (9)..(9): X is K, R or E
  MISC_FEATURE (10)..(10): X is I or V
  MISC_FEATURE (11)..(11): X is I, L or V
  MISC_FEATURE (12)..(12): X is K, R, or Q
  MISC_FEATURE (13)..(13): X is A or L
  MISC_FEATURE (15)..(15): X is Q, E, K or D
  MISC_FEATURE (16)..(16): X is E, K or D
  MISC_FEATURE (19)..(19): X is E, K, R or Q
  MISC_FEATURE (20)..(20): X is S or A
  MISC_FEATURE (22)..(22): X is R, E, K, or Q
  MISC_FEATURE (23)..(23): X is R, E, K, or N
  MISC_FEATURE (25)..(25): X is Q, E, K, or N
  MISC_FEATURE (26)..(26): X is D, E, K, or R
  MISC_FEATURE (27)..(27): X is S, K, T or E
  MISC_FEATURE (29)..(29): X is D or N
  MISC_FEATURE (31)..(31): X is E, Q or N
  MISC_FEATURE (32)..(32): X is E, Q or K
  MISC_FEATURE (33)..(33): X is R, I, Q or K
  MISC_FEATURE (34)..(34): X is E or K
  MISC_FEATURE (35)..(35): X is R, E or K
  MISC_FEATURE (37)..(37): X is R, A or V
  MISC_FEATURE (38)..(38): X is R, E or K
  MISC_FEATURE (39)..(39): X is Q, R, E or K
  MISC_FEATURE (41)..(41): X is R or E
  MISC_FEATURE (42)..(42): X is R, K or E
  MISC_FEATURE (45)..(45): X is R, K or E
  MISC_FEATURE (46)..(46): X is R, K, T or E
  MISC_FEATURE (48)..(48): X is Q, K, or E
  MISC_FEATURE (49)..(49): X is K or E
  MISC_FEATURE (50)..(50): X is V or I
  MISC_FEATURE (51)..(51): X is Q, H, L or A
  MISC_FEATURE (52)..(52): X is R, K or N
  MISC_FEATURE (55)..(55): X is R, S, T or N
XXXXXAXXXXXXXIXXAVXXLXXAXXXGXPXXXXXAXXXVXXAVXXAXXXXXDPX

SEQ ID NO: 400 - protein, 57 aa, Artificial Sequence
  Synthetic
SSDEEEARELIERAKEAAERAQEAAERTGDPRVRELARELKRLAQEAAEEVKRDPSS

SEQ ID NO: 401 - protein, 56 aa, Artificial Sequence
  Synthetic
SDVNEALKLIVEAIEAAVRALEAAERTGDPEVRELARELVRLAVEAAEEVQRNPSS

SEQ ID NO: 402 - protein, 55 aa, Artificial Sequence
  Synthetic
EEVNEALKKIVKAIQEAVESLREAEESGDPEKREKARERVREAVERAEEVQRDPS

SEQ ID NO: 403 - protein, 58 aa, Artificial Sequence
  Synthetic
  MISC_FEATURE (1)..(1): X is N, S or D
  MISC_FEATURE (2)..(2): X is T, S or D
  MISC_FEATURE (3)..(3): X is E, K  or D
  MISC_FEATURE (4)..(4): X is E, K , Q or D
  MISC_FEATURE (5)..(5): X is L, A or D
  MISC_FEATURE (6)..(6): X is E, K, R or Q
  MISC_FEATURE (7)..(7): X is E, K, or R
  MISC_FEATURE (8)..(8): X is E, N, or R
  MISC_FEATURE (9)..(9): X is E, A, S, or H
  MISC_FEATURE (10)..(10): X is E, K or R
  MISC_FEATURE (11)..(11): X is E, K or D
  MISC_FEATURE (13)..(13): X is E, K, Q or R
  MISC_FEATURE (14)..(14): X is E, K, or R
  MISC_FEATURE (15)..(15): X is E, K, D or R
  MISC_FEATURE (16)..(16): X is L, Y, A or E
  MISC_FEATURE (17)..(17): X is Q, R, E or K
  MISC_FEATURE (18)..(18): X is R, E or K
  MISC_FEATURE (20)..(20): X is R, E or K
  MISC_FEATURE (21)..(21): X is E or K
  MISC_FEATURE (22)..(22): X is R, E or K
  MISC_FEATURE (23)..(23): X is S or A
  MISC_FEATURE (24)..(24): X is E or K
  MISC_FEATURE (25)..(25): X is R, E or K
  MISC_FEATURE (27)..(27): X is R, E, Q or K
  MISC_FEATURE (28)..(28): X is R, E, or K
  MISC_FEATURE (29)..(29): X is R, Q, T, or K
  MISC_FEATURE (33)..(33): X is R, Q, E, or K
  MISC_FEATURE (34)..(34): X is E, T, A, or K
  MISC_FEATURE (35)..(35): X is E, L, A, or K
  MISC_FEATURE (37)..(37): X is E or K
  MISC_FEATURE (41)..(41): X is R, I, E or K
  MISC_FEATURE (42)..(42): X is R, I, E or A
  MISC_FEATURE (44)..(44): X is R, K, Q or D
  MISC_FEATURE (46)..(46): X is V or A
  MISC_FEATURE (47)..(47): X is Q, K, E or A
  MISC_FEATURE (48)..(48): X is I, K, E or R
  MISC_FEATURE (49)..(49): X is I, K, A or L
  MISC_FEATURE (51)..(51): X is R, E or K
  MISC_FEATURE (52)..(52): X is V or A
  MISC_FEATURE (54)..(54): X is K, S, E or A
  MISC_FEATURE (55)..(55): X is K, R, E or D
  MISC_FEATURE (56)..(56): X is K, R, E or A
  MISC_FEATURE (58)..(58): X is N, S or D
XXXXXXXXXXXAXXXXXXAXXXXXXAXXXGDLXXXAXALIXXAXAXXXXAXXAXXXGX

SEQ ID NO: 404 - protein, 57 aa, Artificial Sequence
  Synthetic
  MISC_FEATURE (1)..(1): X is S, R, D or K
  MISC_FEATURE (2)..(2): X is E, Q, D or K
  MISC_FEATURE (3)..(3): X is E, T, L or A
  MISC_FEATURE (5)..(5): X is E, D, K or Q
  MISC_FEATURE (6)..(6): X is E, R, K or Q
  MISC_FEATURE (8)..(8): X is E, S, K or A
  MISC_FEATURE (9)..(9): X is E, K or R
  MISC_FEATURE (10)..(10): X is E, K, W or R
  MISC_FEATURE (12)..(12): X is E, K, Q or R
  MISC_FEATURE (13)..(13): X is E, K, Q or R
  MISC_FEATURE (15)..(15): X is L, E, A or Y
  MISC_FEATURE (16)..(16): X is E, R, K or Q
  MISC_FEATURE (17)..(17): X is E, D, K or Q
  MISC_FEATURE (19)..(19): X is E, R, K or Q
  MISC_FEATURE (20)..(20): X is E or K
  MISC_FEATURE (21)..(21): X is V or I
  MISC_FEATURE (22)..(22): X is S or A
  MISC_FEATURE (23)..(23): X is E, K,R or D
  MISC_FEATURE (24)..(24): X is E, K,R or Q
  MISC_FEATURE (26)..(26): X is E, K or R
  MISC_FEATURE (27)..(27): X is E or K
  MISC_FEATURE (28)..(28): X is Q, N, E or K
  MISC_FEATURE (30)..(30): X is D or N
  MISC_FEATURE (31)..(31): X is D, L, Y or E
  MISC_FEATURE (32)..(32): X is R, Q, K or E
  MISC_FEATURE (33)..(33): X is V or A
  MISC_FEATURE (34)..(34): X is L or A
  MISC_FEATURE (41)..(41): X is I, R, Q or A
  MISC_FEATURE (43)..(43): X is L or Q
  MISC_FEATURE (45)..(45): X is V or A
  MISC_FEATURE (46)..(46): X is L, V or A
  MISC_FEATURE (48)..(48): X is L, I, K or A
  MISC_FEATURE (50)..(50): X is L, I, V or E
  MISC_FEATURE (51)..(51): X is V or A
  MISC_FEATURE (53)..(53): X is S, E, K or A
  MISC_FEATURE (54)..(54): X is S or A
  MISC_FEATURE (55)..(55): X is R, E, K or S
  MISC_FEATURE (57)..(57): X is N, D or S
XXXAXXAXXXAXXVXXXAXXXXXXAXXXGXXXXXALALIAXAXAXXAXAXXAXXXGX

SEQ ID NO: 405 - protein, 56 aa, Artificial Sequence
  Synthetic
  MISC_FEATURE (1)..(1): X is K, Q, S or R
  MISC_FEATURE (2)..(2): X is E, D, K or S
  MISC_FEATURE (3)..(3): X is E, T, K or A
  MISC_FEATURE (5)..(5): X is E, D, K or R
  MISC_FEATURE (6)..(6): X is E, K or R
  MISC_FEATURE (8)..(8): X is Y, A, E,  or K
  MISC_FEATURE (9)..(9): X is R, Q, E,  or K
  MISC_FEATURE (10)..(10): X is R, D, E,  or K
  MISC_FEATURE (12)..(12): X is R, Q, E,  or K
  MISC_FEATURE (13)..(13): X is R, Q, E,  or K
  MISC_FEATURE (15)..(15): X is Y, A, E, or K
  MISC_FEATURE (16)..(16): X is R, E, or K
  MISC_FEATURE (17)..(17): X is S, R, E, or K
  MISC_FEATURE (19)..(19): X is S, R, E, or K
  MISC_FEATURE (20)..(20): X is E or K
  MISC_FEATURE (21)..(21): X is V or I
  MISC_FEATURE (22)..(22): X is K, A or R
  MISC_FEATURE (23)..(23): X is K, E or R
  MISC_FEATURE (24)..(24): X is S, Q, E or R
  MISC_FEATURE (26)..(26): X is D, Q, E or R
  MISC_FEATURE (27)..(27): X is K, E or R
  MISC_FEATURE (28)..(28): X is K, N or Q
  MISC_FEATURE (30)..(30): X is N or D
  MISC_FEATURE (31)..(31): X is S, E, Q or D
  MISC_FEATURE (32)..(32): X is E or K
  MISC_FEATURE (33)..(33): X is V or A
  MISC_FEATURE (34)..(34): X is K, L, Y or A
  MISC_FEATURE (35)..(35): X is K, R, N, or D
  MISC_FEATURE (38)..(38): X is K, Q, N, or E
  MISC_FEATURE (39)..(39): X is K, T, R, or E
  MISC_FEATURE (41)..(41): X is I, A, R, or E
  MISC_FEATURE (42)..(42): X is Q, E, N, or K
  MISC_FEATURE (43)..(43): X is L or K
  MISC_FEATURE (45)..(45): X is R, E, D or K
  MISC_FEATURE (46)..(46): X is R, E or K
  MISC_FEATURE (48)..(48): X is R, I, A or K
  MISC_FEATURE (49)..(49): X is R, Q, E or K
  MISC_FEATURE (50)..(50): X is H, I, L or Q
  MISC_FEATURE (51)..(51): X is V or A
  MISC_FEATURE (52)..(52): X is Q, K, D or A
  MISC_FEATURE (53)..(53): X is E, K, D or R
  MISC_FEATURE (54)..(54): X is T, S or A
  MISC_FEATURE (55)..(55): X is R, K, Q or S
XXXAXXAXXXAXXVXXXAXXXXXXAXXXGXXXXXXLAXXAXXXAXXAXXXXXXXXG

SEQ ID NO: 406 - protein, 58 aa, Artificial Sequence
  Synthetic
NSEELERESEEAERRLQEARKRSEEARERGDLKELAEALIEEARAVQELARVASERGN

SEQ ID NO: 407 - protein, 57 aa, Artificial Sequence
  Synthetic
SEEAERASEKAQRVLEEARKVSEEAREQGDDEVLALALIAIALAVLALAEVASSRGN

SEQ ID NO: 408 - protein, 56 aa, Artificial Sequence
  Synthetic
KEEAERAYEDARRVEEEARKVKESAEEQGDSEVKRLAEEAEQLAREARRHVQETRG

SEQ ID NO: 409 - protein, 59 aa, Artificial Sequence
  Synthetic
  MISC_FEATURE (1)..(1): X is N or D
  MISC_FEATURE (2)..(2): X is T, S or D
  MISC_FEATURE (3)..(3): X is E, R or D
  MISC_FEATURE (4)..(4): X is E, R or D
  MISC_FEATURE (5)..(5): X is V, A or D
  MISC_FEATURE (6)..(6): X is K, E or Q
  MISC_FEATURE (7)..(7): X is K, E, R or Q
  MISC_FEATURE (8)..(8): X is K, A, or L
  MISC_FEATURE (9)..(9): X is V, A, N or Q
  MISC_FEATURE (10)..(10): X is E, R or K
  MISC_FEATURE (11)..(11): X is E, R, D or K
  MISC_FEATURE (13)..(13): X is E, R, D or Q
  MISC_FEATURE (14)..(14): X is E, R, K or Q
  MISC_FEATURE (15)..(15): X is L or A
  MISC_FEATURE (16)..(16): X is R, E, I or A
  MISC_FEATURE (17)..(17): X is R, E, or K
  MISC_FEATURE (18)..(18): X is D, E, or K
  MISC_FEATURE (20)..(20): X is R, Q, E, or K
  MISC_FEATURE (21)..(21): X is E or K
  MISC_FEATURE (22)..(22): X is L, A or W
  MISC_FEATURE (23)..(23): X is I, E A or Q
  MISC_FEATURE (24)..(24): X is K, D, E or R
  MISC_FEATURE (25)..(25): X is K or E
  MISC_FEATURE (27)..(27): X is R, Q, K or E
  MISC_FEATURE (28)..(28): X is K or E
  MISC_FEATURE (29)..(29): X is T, K or E
  MISC_FEATURE (30)..(30): X is G or N
  MISC_FEATURE (31)..(31): X is D, T, S or N
  MISC_FEATURE (32)..(32): X is P or T
  MISC_FEATURE (33)..(33): X is E, D, Q or T
  MISC_FEATURE (34)..(34): X is L, A or K
  MISC_FEATURE (36)..(36): X is R, K, E, or D
  MISC_FEATURE (37)..(37): X is K or E
  MISC_FEATURE (39)..(39): X is L, I, V or A
  MISC_FEATURE (40)..(40): X is E or R
  MISC_FEATURE (41)..(41): X is A, K, W or R
  MISC_FEATURE (42)..(42): X is L or V
  MISC_FEATURE (43)..(43): X is E, I, K or R
  MISC_FEATURE (44)..(44): X is E, K or R
  MISC_FEATURE (46)..(46): X is V, I or A
  MISC_FEATURE (47)..(47): X is R, E or K
  MISC_FEATURE (48)..(48): X is A or L
  MISC_FEATURE (49)..(49): X is A or V
  MISC_FEATURE (50)..(50): X is E, A, K or R
  MISC_FEATURE (51)..(51): X is E, Q, K or R
  MISC_FEATURE (53)..(53): X is I or L
  MISC_FEATURE (54)..(54): X is K, R or D
  MISC_FEATURE (55)..(55): X is Q, E, R or D
  MISC_FEATURE (56)..(56): X is N, D, E or R
  MISC_FEATURE (58)..(58): X is N, D, G or R
  MISC_FEATURE (59)..(59): X is N or D
XXXXXXXXXXXAXXXXXXAXXXXXXAXXXXXXXXLXXAXXXXXXAXXXXXXAXXXXPXX

SEQ ID NO: 410 - protein, 58 aa, Artificial Sequence
  Synthetic
  MISC_FEATURE (1)..(1): X is D, E, K or S
  MISC_FEATURE (2)..(2): X is D, E, or K
  MISC_FEATURE (4)..(4): X is V or A
  MISC_FEATURE (5)..(5): X is E, K, N or R
  MISC_FEATURE (6)..(6): X is T, A, I or L
  MISC_FEATURE (7)..(7): X is A or L
  MISC_FEATURE (8)..(8): X is V, A, N or Q
  MISC_FEATURE (9)..(9): X is R, E, D or K
  MISC_FEATURE (10)..(10): X is L, I, A or V
  MISC_FEATURE (12)..(12): X is R, E, K or Q
  MISC_FEATURE (13)..(13): X is R, E, L or D
  MISC_FEATURE (14)..(14): X is L or A
  MISC_FEATURE (15)..(15): X is K, A, Q or I
  MISC_FEATURE (16)..(16): X is K, E or R
  MISC_FEATURE (17)..(17): X is V, A or I
  MISC_FEATURE (19)..(19): X is E, K, Q, or R
  MISC_FEATURE (20)..(20): X is E, K, D, or L
  MISC_FEATURE (21)..(21): X is A or L
  MISC_FEATURE (22)..(22): X is Q, I, E or A
  MISC_FEATURE (23)..(23): X is E, K, Q or R
  MISC_FEATURE (24)..(24): X is E, L, I or R
  MISC_FEATURE (26)..(26): X is K, E, R or Q
  MISC_FEATURE (27)..(27): X is K, R, or D
  MISC_FEATURE (28)..(28): X is T or E
  MISC_FEATURE (30)..(30): X is D, N, T or S
  MISC_FEATURE (31)..(31): X is P or T
  MISC_FEATURE (32)..(32): X is E, Q, R or T
  MISC_FEATURE (33)..(33): X is L or A
  MISC_FEATURE (35)..(35): X is K, R, D or E
  MISC_FEATURE (36)..(36): X is L, E, K or W
  MISC_FEATURE (38)..(38): X is L, I, V or A
  MISC_FEATURE (39)..(39): X is R, E or K
  MISC_FEATURE (41)..(41): X is L or V
  MISC_FEATURE (42)..(42): X is E, K or I
  MISC_FEATURE (43)..(43): X is V, A or L
  MISC_FEATURE (45)..(45): X is V, A or I
  MISC_FEATURE (46)..(46): X is R, E, K or Q
  MISC_FEATURE (48)..(48): X is V or A
  MISC_FEATURE (49)..(49): X is E or A
  MISC_FEATURE (50)..(50): X is L, I, E or A
  MISC_FEATURE (52)..(52): X is L or I
  MISC_FEATURE (53)..(53): X is K, R or E
  MISC_FEATURE (54)..(54): X is S or A
  MISC_FEATURE (55)..(55): X is N, D, R or E
  MISC_FEATURE (57)..(57): X is N, D, S or E
  MISC_FEATURE (58)..(58): X is N or D
XXAXXXXXXXAXXXXXXAXXXXXXAXXXGXXXXLXXAXXAXXXAXXAXXXAXXXXPXX

SEQ ID NO: 411 - protein, 57 aa, Artificial Sequence
  Synthetic
  MISC_FEATURE (1)..(1): X is E, K, Q or R
  MISC_FEATURE (2)..(2): X is E, K, D or R
  MISC_FEATURE (4)..(4): X is V or A
  MISC_FEATURE (5)..(5): X is E, K, D or R
  MISC_FEATURE (6)..(6): X is T, A, I or L
  MISC_FEATURE (7)..(7): X is A or L
  MISC_FEATURE (8)..(8): X is K, Q, E or A
  MISC_FEATURE (9)..(9): X is K, R, E or S
  MISC_FEATURE (10)..(10): X is L, I, A or V
  MISC_FEATURE (12)..(12): X is E, Q, K, or R
  MISC_FEATURE (13)..(13): X is E, L, A, or R
  MISC_FEATURE (14)..(14): X is L or  A
  MISC_FEATURE (15)..(15): X is R, K, E or Q
  MISC_FEATURE (16)..(16): X is R, K, E or S
  MISC_FEATURE (17)..(17): X is V, I or A
  MISC_FEATURE (19)..(19): X is E, K or R
  MISC_FEATURE (20)..(20): X is E, L, D or I
  MISC_FEATURE (21)..(21): X is L or A
  MISC_FEATURE (22)..(22): X is E or K
  MISC_FEATURE (23)..(23): X is R, D, E or K
  MISC_FEATURE (24)..(24): X is R, L, I or Q
  MISC_FEATURE (26)..(26): X is K, Q, E or R
  MISC_FEATURE (27)..(27): X is K, E or R
  MISC_FEATURE (28)..(28): X is T, H or Q
  MISC_FEATURE (29)..(29): X is G or N
  MISC_FEATURE (30)..(30): X is D, T, S or N
  MISC_FEATURE (31)..(31): X is P, E, R or S
  MISC_FEATURE (32)..(32): X is T, E, R or D
  MISC_FEATURE (33)..(33): X is L or A
  MISC_FEATURE (34)..(34): X is Q, E,  or K
  MISC_FEATURE (35)..(35): X is N, E, or K
  MISC_FEATURE (36)..(36): X is L, A, I or K
  MISC_FEATURE (38)..(38): X is E, Q or K
  MISC_FEATURE (39)..(39): X is E, R, D or K
  MISC_FEATURE (41)..(41): X is E, R, or K
  MISC_FEATURE (42)..(42): X is E, R, or K
  MISC_FEATURE (43)..(43): X is V, A or L
  MISC_FEATURE (45)..(45): X is D, K, N or R
  MISC_FEATURE (46)..(46): X is K, E or R
  MISC_FEATURE (48)..(48): X is K, E, Q or R
  MISC_FEATURE (49)..(49): X is K, E, or Q
  MISC_FEATURE (50)..(50): X is L, E, A or I
  MISC_FEATURE (52)..(52): X is K, R or Q
  MISC_FEATURE (53)..(53): X is K, R, E or D
  MISC_FEATURE (54)..(54): X is S or A
  MISC_FEATURE (55)..(55): X is N, D, R or S
  MISC_FEATURE (57)..(57): X is N, D, T or S
XXAXXXXXXXAXXXXXXAXXXXXXAXXXXXXXXXXXAXXAXXXAXXAXXXAXXXXPX

SEQ ID NO: 412 - protein, 59 aa, Artificial Sequence
  Synthetic
NDEEVQEAVERAEELREEAEELIKKARKTGDPELLRKALEALEEAVRAVEEAIKRNPDN

SEQ ID NO: 413 - protein, 58 aa, Artificial Sequence
  Synthetic
DEAVETAVRLARELKKVAEELQERAKKTGDPELLKLALRALEVAVRAVELAIKSNPDN

SEQ ID NO: 414 - protein, 57 aa, Artificial Sequence
  Synthetic
EEAVETAKRLAEELRKVAELLEERAKETGDPELQELAKRAKEVADRARELAKKSNPN

SEQ ID NO: 415 - protein, 145 aa, Artificial Sequence
  Synthetic
GCDQVAKDASSTIREVIEKNPNYSEKVADVAAKIVKKIIEGNPNGCDCVAKAASSIIRAVIEKNPNYSEVVADVAAAIVKAIIEGNPNGCDCVAKAASSIIRAVIEKNPNYSEVVADVAAAIVKAIIEGNPNGRDCVRKAASSII

SEQ ID NO: 416 - protein, 177 aa, Artificial Sequence
  Synthetic
SDADEAAKEANKAENKARNRNDDEAAKAVKLIKEAIERAKKRNESDAVEAAKEAAKALNKALNRNDDEAAKAVALIAEAIIRALKRNESDAVEAAKEAAKALNKALNRNDDEAAKAVALIAEAIIRALKRNESDAVEKAKEAAKNLNKALNRNDDEQAKHVAKQAENIIRALKRNES

SEQ ID NO: 417 - protein, 169 aa, Artificial Sequence
  Synthetic
SSEDTVRKIAQKCSEAIRESNDCEEAARKCAKTISEAIRESNSSELAVRIIAQVCSEAIRESNDCECAARICAKIISEAIRESNSSELAVRIIAQVCSEAIRESNDCECAARICAKIISEAIRESNSSELAKRIIKQVCSEAKRESNDTECAKRICTKIKSEAKRESNS

SEQ ID NO: 418 - protein, 201 aa, Artificial Sequence
  Synthetic
SYEDECEEKARRVAEKVERLKRSGTSEDEIAEEVAREISEVIRTLKESGSSYEVICECVARIVAEIVEALKRSGTSEDEIAEIVARVISEVIRTLKESGSSYEVICECVARIVAEIVEALKRSGTSEDEIAEIVARVISEVIRTLKESGSSYEVIKECVQRIVEEIVEALKRSGTSEDEINEIVRRVKSEVERTLKESGSS

SEQ ID NO: 419 - protein, 199 aa, Artificial Sequence
  Synthetic
SSEKEELRERLVKICVENAKRKGDDTEEAREAAREAFELVREAAERAGIDSSEVLELAIRLIKECVENAQREGYDISEACRAAAEAFKRVAEAAKRAGITSSEVLELAIRLIKECVENAQREGYDISEACRAAAEAFKRVAEAAKRAGITSSETLKRAIEEIRKRVEEAQREGNDISEACRQAAEEFRKKAEELKRRGD

SEQ ID NO: 420 - protein, 168 aa, Artificial Sequence
  Synthetic
SEEKEEALKKVREAAKKLGSSDEEARKCFEEAREWAERTGSSAYEAAEALFKVLEAAYKLGSSAEEACECFNQAAEWAERTGSGAYEAAEALFKVLEAAYKLGSSAEEACECFNQAAEWAERTGSGAYEAAERLFEELERAYEEGSSAEEACEEFNKKEEEAHRKGKK

SEQ ID NO: 421 - protein, 169 aa, Artificial Sequence
  Synthetic
STKEDARSTCEKAARKAAESNDEEVAKQAAKDCLEVAKQAGMPTKEAARSFCEAAARAAAESNDEEVAKIAAKACLEVAKQAGMPTKEAARSFCEAAARAAAESNDEEVAKIAAKACLEVAKQAGMPTKEAARSFCEAAKRAAKESNDEEVEKIAKKACKEVAKQAGMP

SEQ ID NO: 422 - protein, 181 aa, Artificial Sequence
  Synthetic
SDEMKKVMEALKKAVELAKKNNDDEVAREIERAAKEIVEALRENNSDEMAKVMLALAKAVLLAAKNNDDEVAREIARAAAEIVEALRENNSDEMAKVMLALAKAVLLAAKNNDDEVAREIARAAAEIVEALRENNSDEMAKKMLELAKRVLDAAKNNDDETAREIARQAAEEVEADRENNS

SEQ ID NO: 423 - protein, 201 aa, Artificial Sequence
  Synthetic
SYEDEAEEKARRVAEKVERLKRSGTSEDEIAEEVAREISEVIRTLKESGSSYEVIAEIVARIVAEIVEALKRSGTSEDEIAEIVARVISEVIRTLKESGSSYEVIAEIVARIVAEIVEALKRSGTSEDEIAEIVARVISEVIRTLKESGSSYEVIKEIVQRIVEEIVEALKRSGTSEDEINEIVRRVKSEVERTLKESGSS

SEQ ID NO: 424 - protein, 199 aa, Artificial Sequence
  Synthetic
SSEKEELRERLVKIVVENAKRKGDDTEEAREAAREAFELVREAAERAGIDSSEVLELAIRLIKEVVENAQREGYDISEAARAAAEAFKRVAEAAKRAGITSSEVLELAIRLIKEVVENAQREGYDISEAARAAAEAFKRVAEAAKRAGITSSETLKRAIEEIRKRVEEAQREGNDISEAARQAAEEFRKKAEELKRRGD

SEQ ID NO: 425 - protein, 177 aa, Artificial Sequence
  Synthetic
SDADEAAKEANKAENKARNRNDDEAAKAVKLCKEAIERAKKRNESDAVEAAKEAAKALNKALNRNDDEAAKAVALCCEAIIRALKRNESDAVEAAKEAAKALNKALNRNDDEAAKAVALCCEAIIRALKRNESDAVEKAKEAAKNLNKALNRNDDEQAKHVAKQCENIIRALKRNES

SEQ ID NO: 426 - protein, 145 aa, Artificial Sequence
  Synthetic
DDEEQCREIAEKAKQTYTDDEEIARIIAEAARQTTTDDEEICRCIAEAAKQTYTDDEEIARIIAYAARQTTTDDEEICRCIAEAAKQTYTDDEEIARIIAYAARQTTTDDEEIERCIEEAAKQTYTDDEEIERIKEYARRQTTTD

SEQ ID NO: 427 - protein, 145 aa, Artificial Sequence
  Synthetic
NAEDKAREVLKELKDEGSPEEEAARQVLKDLNREGSNAEDAARAVLKALKDEGSPEEEAARAVLKALNREGSNAEDAARAVLKALKDEGSPEEEAARAVLKALNREGSNEEDASRAVLKALKDEGSPEEEARRAVEKALNREGSN

SEQ ID NO: 428 - protein, 161 aa, Artificial Sequence
  Synthetic
DSEEVNERVKQLAEKAKEATDKEEVIEIVKELAELAKQSTDSELVNEIVKQLAEVAKEATDKELVIYIVKILAELAKQSTDSELVNEIVKQLAEVAKEATDKELVIYIVKILAELAKQSTDSELVNEIVKQLEEVAKEATDKELVEHIEKILEELKKQSTD

SEQ ID NO: 429 - protein, 185 aa, Artificial Sequence
  Synthetic
NDERQKQREEVRKLAEELASKATDEELIKEIKKCAQLAEELASRSTNDELIKQILEVAKLAFELASKATDEELIKEILKCCQLAFELASRSTNDELIKQILEVAKLAFELASKATDEELIKEILKCCQLAFELASRSTNDEEIKQILETAKEAFERASKATDEEEIKEILKKCQEKFEKKSRSTN

SEQ ID NO: 430 - protein, 177 aa, Artificial Sequence
  Synthetic
NDKAKEAEELLRKALEKAEKENDETAIRCVELLKEALERAKKNNNDKAIEAVELLAKALEKALKENDETAIRCVCLLAEALLRALKNNNDKAIEAVELLAKALEKALKENDETAIRCVCLLAEALLRALKNNNDKAIEEVERLAKELEKALKENDETKIREVCERAEELLRRLKNNN

SEQ ID NO: 431 - protein, 217 aa, Artificial Sequence
  Synthetic
SSEDAREKIEQLCREAKEIAERAKQQNSQEEAREAIEKLLRIAKRIAELAKQANQSEVAREAIECLCRIAKLIAELAKQANSQEVAREAIEALLRIAKLIAELAKQANQSEVAREAIECLCRIAKLIAELAKQANSQEVAREAIEALLRIAKLIAELAKQANQSEVAREAIECLSRIAKLIEELAKQANSQEVKREAQEALDRIQKLIEELQKQANQ

SEQ ID NO: 432 - protein, 240 aa, Artificial Sequence
  Synthetic
DIEKLCKKAESEAREARSKAEELRQRHPDSQAARDAQKLASQAEEAVKLACELAQEHPNADIAKLCIKAASEAAEAASKAAELAQRHPDSQAARDAIKLASQAAEAVKLACELAQEHPNADIAKLCIKAASEAAEAASKAAELAQRHPDSQAARDAIKLASQAAEAVKLACELAQEHPNADIAKKCIKAASEAAEEASKAAEEAQRHPDSQKARDEIKEASQKAEEVKERCERAQEHPNA

SEQ ID NO: 433 - protein, 152 aa, Artificial Sequence
  Synthetic
DEIEKVREEAEKLKKKTDDEDVLEVAREAIRAAKEATSDEILKVIKEALKLAKKTTDKDVLEVAREAIRAAEEATDDEILKVIKEALKLAKKTTDKDVLEVAREAIRAAEEATDEEILKEIKEALKKAKETTDTEELEKAREQIRKAEESTD

SEQ ID NO: 434 - protein, 152 aa, Artificial Sequence
  Synthetic
SDIEEIRQLAEELRKKSDNEEVRKLAQEAAELAKRSTDSDVLEIVKDALELAKQSTNEEVIKLALKAAVLAAKSTDSDVLEIVKDALELAKQSTNEEVIKLALKAAVLAAKSTDEEVLEEVKEALRRAKESTDEEEIKEELRKAVEEAESTD

SEQ ID NO: 435 - protein, 152 aa, Artificial Sequence
  Synthetic
SEKEKVEELAQRIREQLPDTELAREAQELADEARKSDDSEALKVVYLALRIVQQLPDTELAREALELAKEAVKSTDSEALKVVYLALRIVQQLPDTELAREALELAKEAVKSTDQEALKSVYEALQRVQDKPNTEEARESLERAKEDVKSTD

SEQ ID NO: 436 - protein, 160 aa, Artificial Sequence
  Synthetic
DDAEELRERARDLLRKNGSSEEEIKKVDEELEKIVRKADSDDAVKLAVKAAALLAENGSSAEEIVKVLEELLKIVEKADSDDAVKLAVKAAALLAENGSSAEEIVKVLEELLKIVEKADSEEEVKDAVREAAELAERGSSAEEIRKQLKDRLRKVEESDS

SEQ ID NO: 437 - protein, 160 aa, Artificial Sequence
  Synthetic
SDSEKLAKRVLKELKRRGTSDEELERMKRELEKIIKSATSSDAMRLALRVVLELVRRGTSSEILEKMMRMLIKIIQSATSSDAMRLALRVVLELVRRGTSSEILEKMMRMLIKIIQSATSDDQMREALRQVLEEVRKGTSSEQLERSMRKLIKEIKKRTS

SEQ ID NO: 438 - protein, 184 aa, Artificial Sequence
  Synthetic
SEAEELARRAAKEAKELCKRSTDEELCKELKKLAELLKELAERYPDSEAAKLALKAALEAIELCKQSTDEELCEELVKLAQKLIELAKRYPDSEAAKLALKAALEAIELCKQSTDEELCEELVKLAQKLIELAKRYPDSEEAKRALKEAKELIEQCKESTDEDECRELVKRAEELIREAKENPD

SEQ ID NO: 439 - protein, 180 aa, Artificial Sequence
  Synthetic
DERDKVRELIDRVEKELKREGTSEELIEEIRKVLKKAKEAADSDDDEAIKVAKEIVRVILELVREGTSSELIEEILKVLSLAAEAAKSTDDEAIKVAKEIVRVILELVREGTSSELIEEILKVLSLAAEAAKSTDEEAIKKAKEIVRRILELTREGTSEEEIREELKELRKKAQKAKSPE

SEQ ID NO: 440 - protein, 208 aa, Artificial Sequence
  Synthetic
DECERLRQEVEKAEKELEKLAKQSTDEEVRQIAREVAKQLRRLAEEACRSNSDECLRLASEVVKAVQELVKLAEQATDEEVIRVALEVARELIRLAQEACRSNDDECLRLASEVVKAVQELVKLAEQATDEEVIRVALEVARELIRLAQEACRSNDEECLREASEVVKEVQELVKEAEKSTDEEEIRELLQRAEERIREAQERCREGD

SEQ ID NO: 441 - protein, 216 aa, Artificial Sequence
  Synthetic
TRQKEQLDEVLEEIQRLAEEARKLMTDEEEAKKIQEEAERAKEMLRRAVEKVTDNEVIEKLLEVVKEIIRLAEEAMKKMTDEEEAAKIAKEALEAIKMLARAVEEVTDNEVIEKLLEVVKEIIRLAEEAMKKMTDEEEAAKIAKEALEAIKMLARAVEEVTDKERIEQLLREVKEEIRRAEEESRKETDDEEAAKRAREALRRIRERAREVEEDKS

SEQ ID NO: 442 - protein, 220 aa, Artificial Sequence
  Synthetic
DEEVQRIREEVRRAIEEVRESLERNDSEEAEELAREALERVAEEVKESIKERPDRDLAIEAIRALVRLAIEIVRLALEQNDSELAREVAEEALRAVAEVVKEAIRQRGDRDLAIEAIRALVRLAIEIVRLALEQNDSELAREVAEEALRAVAEVVKEAIRQRGDRELAKEAIRALRRLAEEIRRLAEEQNDDELAREVEELAREAIEEVRKELERQRPGR

SEQ ID NO: 443 - protein, 212 aa, Artificial Sequence
  Synthetic
SEVEESAQEVEKRAQEVREEAERRGTSQEVLDEIKRVVDEARQLAQRAKESDDSEVAESALQVVREALKVVLSALERGTSEEVLKEILRVVSEAIKLALEAIKSSDSEVAESALQVVREALKVVLSALERGTSEEVLKEILRVVSEAIKLALEAIKSSDSETARRALEKVRESLKEVLEQLERGTSEEELRESLREVSENIRKALEEIKSPD

SEQ ID NO: 444 - protein, 220 aa, Artificial Sequence
  Synthetic
STVKELLDRARELMRELAERASEQGSDEEEARKLLEDLEQLVQEIRRELEETGTSSEVIRLIAKAIMLMAELALRAAEQGSDAEEAMKLLKDLLRLVLEILRELRETGTDSEVIRLIAKAIMLMAELALRAAEQGSDAEEAMKLLKDLLRLVLEILRELRETGTDKEEIRKVAEEIMRRAKTALDEARQGSDAEEAMKRLKEQLRRILERLREEREKGTD

SEQ ID NO: 445 - protein, 164 aa, Artificial Sequence
  Synthetic
DSYTERARKAVKRYVKEEGGSEEEAEREAEKVREEIRKKASDSYLIQAAAAVVAYVIEEGGSPEEAVKIAEEVVRRIKEKADDSYLIQAAAAVVAYVIEEGGSPEEAVKIAEEVVRRIKEKADDRELIRRAAERVAEVIERGGSPEEAVKEAEKEVKKQKEESD

SEQ ID NO: 446 - protein, 164 aa, Artificial Sequence
  Synthetic
SIQEKAKQSVIRKVKEEGGSEEEARERAKEVEERLKKEADDSTLVRAAAAVVLYVLEKGGSTEEAVQRAREVIERLKKEASDSTLVRAAAAVVLYVLEKGGSTEEAVQRAREVIERLKKEASDEELIREAAKEVLKVLEEGGSVEEAVERARERIEELQKRSDD

SEQ ID NO: 447 - protein, 164 aa, Artificial Sequence
  Synthetic
SETEEVKKLVEEKVKKEGGSPEEAKETAKEVTEELKEESQDSTLLKVAALVASAVLKEGGSPEEAAETAKEVVKELRKSASDSTLLKVAALVASAVLKEGGSPEEAAETAKEVVKELRKSASDEELLKEAARQAEESLRQGKSPEEAAEEAKKEVKKLKEKSQD

SEQ ID NO: 448 - protein, 164 aa, Artificial Sequence
  Synthetic
SETEEVKKLCEEKVKKEGGSPEEAKETAKEVTEELKEESQDSTLLKVAALCASAVLKEGGSCEEAAETAKEVVKELRKSASDSTLLKVAALCASAVLKEGGSCEEAAETAKEVVKELRKSASDEELLKEAARQAEESLRQGKSCEEAAEEAKKEVKKLKEKSQD

SEQ ID NO: 449 - protein, 164 aa, Artificial Sequence
  Synthetic
SEEDEVAKQASRYAKEQGGDPEKSREEAEKALEEVKKQATSSEALQVALEAARYASEEGEDPAEALKEAARALEEVRRSATSSEALQVALEAARYASEEGEDPAEALKEAARALEEVRRSATSEEDLKEALDRAREASERGQNPAESLKEAAEELKKKKEKSSD

SEQ ID NO: 450 - protein, 164 aa, Artificial Sequence
  Synthetic
SDLEKALKRFVKEEKKKGRNPEEAKKEAKKLKKKLKKSAGSSDLLTALAKFVLEEVRKGRNPEEAVKEAIKLAEKLKRSAGSSDLLTALAKFVLEEVRKGRNPEEAVKEAIKLAEKLKRSAGSSEQLEKLATKVLEEVKKGRNPKRAVEEAIKQAKEDRKRSNS

SEQ ID NO: 451 - protein, 164 aa, Artificial Sequence
  Synthetic
SSTERAAQSVKKYLQQQGKDPDQAQKKAQEVKENIEKEANSSSVIRAAAAVVFYLLEQGYDPDQALKKAQEVARNIENEANSSSVIRAAAAVVFYLLEQGYDPDQALKKAQEVARNIENEANSDDVIKEAAKVVYKRLEEGQDPDKALEEARKRAQKTEKKTTS

SEQ ID NO: 452 - protein, 164 aa, Artificial Sequence
  Synthetic
SSTERAAQSCKKYLQQQGKDPDQAQKKAQEVKENIEKEANSSSVIRAAAACVFYLLEQGYDCDQALKKAQEVARNIENEANSSSVIRAAAACVFYLLEQGYDCDQALKKAQEVARNIENEANSDDVIKEAAKVVYKRLEEGQDCDKALEEARKRAQKTEKKTTS

SEQ ID NO: 453 - protein, 168 aa, Artificial Sequence
  Synthetic
SDLQEVADRIVEQLKREGRSPEEARKEARRLIEEIKQSAGGDSELIEVAVRIVKELEEQGRSPSEAAKEAVELIERIRRAAGGDSELIEVAVRIVKELEEQGRSPSEAAKEAVELIERIRRAAGGDSDRIKKAVELVRELEERGRSPSEAARRAVEEIQRSVEEDGGN

SEQ ID NO: 454 - protein, 172 aa, Artificial Sequence
  Synthetic
SESDEVAKRISKEAKKEGRSEEEVKELVERFREAIEKLKEQGDSEAIRVAVEIADEALREGLSPEEVVELVERFVQAIQKLQENGESEAIRVAVEIADEALREGLSPEEVVELVERFVQAIQKLQENGEEDEIQKAVETAQEQLEEGRSPKEVVETVEEQVKEVEEKQQKGE

SEQ ID NO: 455 - protein, 228 aa, Artificial Sequence
  Synthetic
SDIEKAKRIADRAIDVVRKAAEKEGGSPEKIREALQQAKRCAEKLIRLVKEAQESNSSDVREAARVALEAVRVVVRAAEEKGGSPEEVVEAVCRAVRCAEKLIRLVKRAEESNSSDVREAARVALEAVRVVVRAAEEKGGSPEEVVEAVCRAVRCAEKLIRLVKRAEESNSENVRESARRALEKVLKTVQQAEEEGKSPEEVVEQVCRSVRKAEEQIRETQERERSTS

SEQ ID NO: 456 - protein, 228 aa, Artificial Sequence
  Synthetic
SDAEEVKKQAEEIANRAYKTAQKQGESDSRAKKAEKLVRKAAEKLARLIERAQKEGDSDALEVARQALEIARRAFETAKKQGHSATEAAKAFVDVVEAAISLAELIISAKRQGDSDALEVARQALEIARRAFETAKKQGHSATEAAKAFVDVVEAAISLAELIISAKRQGDQKALEIARKALQKAKENFEEAQKRGESATQAAKRFVDTVEKEIKKAQEQIKRERKGD

SEQ ID NO: 457 - protein, 228 aa, Artificial Sequence
  Synthetic
SKEEELIEKARRVAKEAIEEAKRQGKDPSEAKKAAEKLIKAVEEAVKEAKRLKEEGNSELAELISEAIQVAVEAVEEAVRQGKDPFKAAEAAAELIRAVVEAVKEAERLKREGNSELAELISEAIQVAVEAVEEAVRQGKDPFKAAEAAAELIRAVVEAVKEAERLKREGNSELAKKINDTIREAVREVQQAVEDGKDPFEAAREAAEKIRESVERVREEEEKKRRGN

SEQ ID NO: 458 - protein, 140 aa, Artificial Sequence
  Synthetic
SNEQEKKDLKKAEEAAKSPDPELIREAIERAEESGSNKAKEIILRAAEEAAKSPDPELIRLAIEAAERSGSNKAKEIILRAAEEAAKSPDPELIRLAIEAAERSGSEKAKEIIKRAAEEAQKSPDPELQKLAKEARERLG

SEQ ID NO: 459 - protein, 140 aa, Artificial Sequence
  Synthetic
SSEEEELEKDAREASESGADPEWLREIVDLARESGDSEVIELAKRALEAAKSGADPEWLLRIVRQAEESGSSEVIELAKRALEAAKSGADPEWLLRIVRQAEESGSEEVIELAKRALEEAKKGKDPKELLEEVRKREESG

SEQ ID NO: 460 - protein, 156 aa, Artificial Sequence
  Synthetic
STKEEKERIERIEKEVRSPDPENIREAVRKAEELLRENPSTEAEELLRRAIEAAVRAPDPEAIREAVRAAEELLRENPSTEAEELLRRAIEAAVRAPDPEAIREAVRAAEELLRENPSEEAKELLRRAIESAKKAPDPEAQREAKRAEEELRKEDP

SEQ ID NO: 461 - protein, 156 aa, Artificial Sequence
  Synthetic
STKEEKERIERIEKEVRSPDCENIREAVRKAEELLRENPSTEAEELLRRAIEAAVRCPDCEAIREAVRAAEELLRENPSTEAEELLRRAIEAAVRCPDCEAIREAVRAAEELLRENPSEEAKELLRRAIESAKKCPDPEAQREAKRAEEELRKEDP

SEQ ID NO: 462 - protein, 160 aa, Artificial Sequence
  Synthetic
NSREEEEAKRIVKEAKKSGFDPEEVEKALREVIRVAEETGNSEALKEALKIVEEAAKSGYDPAEVAKALAEVIRVAEETGNSEALKEALKIVEEAAKSGYDPAEVAKALAEVIRVAEETGNPEELKEALKRVLEAAKRGEDPAQVAKELAEEIRRNQEEG

SEQ ID NO: 463 - protein, 160 aa, Artificial Sequence
  Synthetic
DSEEEQERIRRILKEARKSGTEESLRQAIEDVAQLAKKSQDSEVLEEAIRVILRIAKESGSEEALRQAIRAVAEIAKEAQDSEVLEEAIRVILRIAKESGSEEALRQAIRAVAEIAKEAQDPRVLEEAIRVIRQIAEESGSEEARRQAERAEEEIRRRAQ

SEQ ID NO: 464 - protein, 172 aa, Artificial Sequence
  Synthetic
DPEEVRREVERATEEYRKNPGSDEAREQLKEAVERAEEAARSPDPEAVQVAVEAATQIYENTPGSEEAKKALEIAVRAAENAARLPDPEAVQVAVEAATQIYENTPGSEEAKKALEIAVRAAENAARLPDPEAVRVAEEAADQIRKNTPGSELAKRADEIKKRARELLERLP

SEQ ID NO: 465 - protein, 172 aa, Artificial Sequence
  Synthetic
QSEDRKEKIRELERKARENTGSDEARQAVKEIARIAKEALEEGNADTAKEAIQRLEDLARDYSGSDVASLAVKAIAKIAETALRNGYADTAKEAIQRLEDLARDYSGSDVASLAVKAIAKIAETALRNGYKETAEEAIKRLRELAEDYKGSEVAKLAEEAIERIEKVSRERG

SEQ ID NO: 466 - protein, 172 aa, Artificial Sequence
  Synthetic
QCEDRKEKIRELERKARENTGSDEARQAVKEIARIAKEALEEGCCDTAKEAIQRLEDLARDYSGSDVASLAVKAIAKIAETALRNGCCDTAKEAIQRLEDLARDYSGSDVASLAVKAIAKIAETALRNGCKETAEEAIKRLRELAEDYKGSEVAKLAEEAIERIEKVSRERG

SEQ ID NO: 467 - protein, 172 aa, Artificial Sequence
  Synthetic
SNDEKEKLKELLKRAEELAKSPDPEDLKEAVRLAEEVVRERPGSNLAKKALEIILRAAEELAKLPDPEALKEAVKAAEKVVREQPGSNLAKKALEIILRAAEELAKLPDPEALKEAVKAAEKVVREQPGSELAKKALEIIERAAEELKKSPDPEAQKEAKKAEQKVREERPG

SEQ ID NO: 468 - protein, 172 aa, Artificial Sequence
  Synthetic
TTEDERRELEKVARKAIEAAREGNTDEVREQLQRALEIARESGTTEAVKLALEVVARVAIEAARRGNTDAVREALEVALEIARESGTTEAVKLALEVVARVAIEAARRGNTDAVREALEVALEIARESGTEEAVRLALEVVKRVSDEAKKQGNEDAVKEAEEVRKKIEEESG

SEQ ID NO: 469 - protein, 184 aa, Artificial Sequence
  Synthetic
SSVAEEIEKRAKKISKELKKEGKNPEWIEELQRAADKLVEVARRATSSDALEIAKRAVKIAEELAKQGSNPKWIAELLKAAAKLVEVAARATSSDALEIAKRAVKIAEELAKQGSNPKWIAELLKAAAKLVEVAARATSPKALKQAKEAVKEAEELAKKGRNPKEIAEELKKRAKEVEKLARST

SEQ ID NO: 470 - protein, 184 aa, Artificial Sequence
  Synthetic
SSVAEEIEKRCKKISKELKKEGKNPEWIEELQRACDKLVEVARRATSSDALEIAKRCVKIAEELAKQGSNPKWIAELLKACAKLVEVAARATSSDALEIAKRCVKIAEELAKQGSNPKWIAELLKACAKLVEVAARATSPKALKQAKECVKEAEELAKKGRNPKEIAEELKKCAKEVEKLARST

SEQ ID NO: 471 - protein, 188 aa, Artificial Sequence
  Synthetic
STEELKKVLERVRELSERAKESTDPEEALKIAKEVIELALKAVKEDPSTDALRAVLEAVRLASEVAKRVTDPDKALKIAKLVIELALEAVKEDPSTDALRAVLEAVRLASEVAKRVTDPDKALKIAKLVIELALEAVKEDPSEEAKRAVEEAKRLAEEVSKRVTDPELSEKIRQLVKELEEEAQKEDP

SEQ ID NO: 472 - protein, 188 aa, Artificial Sequence
  Synthetic
STEELKKVLERVRELCERAKESTDPEEALKIAKEVIELALKAVKEDPSTDALRAVLEAVRCACEVAKRVTDPDKALKIAKLVIELALEAVKEDPSTDALRAVLEAVRCACEVAKRVTDPDKALKIAKLVIELALEAVKEDPSEEAKRAVEEAKRCAEEVSKRVTDPELSEKIRQLVKELEEEAQKEDP

SEQ ID NO: 473 - protein, 192 aa, Artificial Sequence
  Synthetic
KTEVEKKAKEVIKEAKELAKELDSEEAKKVVERIKEAAEAAKRAAEQGKTEVAKLALKVLEEAIELAKENRSEEALKVVLEIARAALAAAQAAEEGKTEVAKLALKVLEEAIELAKENRSEEALKVVLEIARAALAAAQAAEEGKSDEARDALRRLEEAIEEAKENRSKESLEKVREEAKEAEQQAEDAREG

SEQ ID NO: 474 - protein, 132 aa, Artificial Sequence
  Synthetic
TDIKKKAEEIIKEAKKQGSEDAIRLAQEAKKQGTDILVRAAEIVVRAQEQGSEDAIRLAKEASREGTDILVRAAEIVVRAQEQGSEDAIRLAKEASREGTPTLVKAAEKVVRAQQKGSQDTIEKAKEESREG

SEQ ID NO: 475 - protein, 132 aa, Artificial Sequence
  Synthetic
TDIKKKAEEIIKEAKKQGSEDAIRLAQECKKQGTDICVRAAEIVVRAQEQGSEDAIRLAKECSREGTDICVRAAEIVVRAQEQGSEDAIRLAKECSREGTPTCVKAAEKVVRAQQKGSQDTIEKAKEESREG

SEQ ID NO: 476 - protein, 172 aa, Artificial Sequence
  Synthetic
DNDEKRKRAEKALQRAQEAEKKGDVEEAVRAAQEAVRAAKESGDNDVLRKVAEQALRIAKEAEKQGNVEVAVKAARVAVEAAKQAGDNDVLRKVAEQALRIAKEAEKQGNVEVAVKAARVAVEAAKQAGDQDVLRKVSEQAERISKEAKKQGNSEVSEEARKVADEAKKQTG

SEQ ID NO: 477 - protein, 216 aa, Artificial Sequence
  Synthetic
DPDEDRERLKEELKKIREALREAKEKPDPEEIKRALREVLEAIRRILKLAERAGDPDLAREALKEINKVIREALEIAKRVPDPEVIKEALRVVLEAIRAILKLAEQAGDPDLAREALKEINKVIREALEIAKRVPDPEVIKEALRVVLEAIRAILKLAEQAGDPDLAREALEEIDKVIDEAQEISERVPDEEVQREAQEVIKEADRARKKLSEQSG

SEQ ID NO: 478 - protein, 228 aa, Artificial Sequence
  Synthetic
DPEDELKRVEKLVKEAEELLRQAKEKGSEEDLEKALRTAEEAAREAKKVLEQAEKEGDPEVALRAVELVVRVAELLLRIAKESGSEEALERALRVAEEAARLAKRVLELAEKQGDPEVALRAVELVVRVAELLLRIAKESGSEEALERALRVAEEAARLAKRVLELAEKQGDPEVARRAVELVKRVAELLERIARESGSEEAKERAERVREEARELQERVKELREREG

SEQ ID NO: 479 - protein, 228 aa, Artificial Sequence
  Synthetic
DPEDELKRVEKLVKEAEELLRQCKEKGSEECLEKALRTAEEAAREAKKVLEQAEKEGDPEVALRAVELVVRVAELLLRICKESGSEECLERALRVAEEAARLAKRVLELAEKQGDPEVALRAVELVVRVAELLLRICKESGSEECLERALRVAEEAARLAKRVLELAEKQGDPEVARRAVELVKRVAELLERICRESGSEECKERAERVREEARELQERVKELREREG

SEQ ID NO: 480 - protein, 216 aa, Artificial Sequence
  Synthetic
TSDDDKVREAEERVREAIERIQRALKKRDTPDARKALEAAKKLLKVVEKAKKRGTSDAIKVAEAAARVAEAIARILEALNERDTPDARKALRAAIKLAEVVYKAAESGTSDAIKVAEAAARVAEAIARILEALNERDTPDARKALRAAIKLAEVVYKAAESGTTEALKVAEKAARVAEKIARILEKLNERDTPEARKKLRQAIKEAEKVYKESEQG

SEQ ID NO: 481 - protein, 240 aa, Artificial Sequence
  Synthetic
TSEIDKLIKKLRQTAKEVKREAEERKRRSTDPTVREVIERLAQLALDVAEEAARLIKKATTSEVAKLVWKLARTAIEVIREAIERAERSTDPEVIRVILELARLAAEVAKEAARLIVKATTSEVAKLVWKLARTAIEVIREAIERAERSTDPEVIRVILELARLAAEVAKEAARLIVKATTEEVAKKVWKEAYRAIEEIRKAIEKAERSTDPNEIKKILEEARKKAEEAIERAKEIVKST

SEQ ID NO: 482 - protein, 244 aa, Artificial Sequence
  Synthetic
TPRERLEEAKERVEEIRELIDKARKLQEQGNKEEAEKVLREAREQIREVTRELEEIAKNSDTPELALRAAELLVRLIKLLIEIAKLLQEQGNKEEAEKVLREATELIKRVTELLEKIAKNSDTPELALRAAELLVRLIKLLIEIAKLLQEQGNKEEAEKVLREATELIKRVTELLEKIAKNSDTPELAKRAAELLKRLIELLKEIAKLLEEEGNEDEAEKVKEEAKELEERVRELEERIRKNSD

SEQ ID NO: 483 - protein, 248 aa, Artificial Sequence
  Synthetic
NPQEDLERAEKVVRSVEEVLQRAKEAQREGDKEKVERLIKEAENQIRKARELLERVVRQNPDDPEVLLRVAELIVRLVEVVLELAKLAEKNGDKEQVERLIQTAEELIREARELLERVSREIPDNPEVLLRVAELIVRLVEVVLELAKLAEKNGDKEQVERLIQTAEELIREARELLERVSREIPDNPESLKRVAELIKRLVKVVDELSKLAERNGDRDQVERLRQLAEELRREAEELEERVRRERPD

SEQ ID NO: 484 - protein, 200 aa, Artificial Sequence
  Synthetic
STEEKIEEARQSIKEAERSLREGNPEKAREDVRRALELVRELEKLARKTGSTEVLIEAARLAIEVARVALKVGSPETAREAVRTALELVQELERQARKTGSTEVLIEAARLAIEVARVALKVGSPETAREAVRTALELVQELERQARKTGSDEVLKRAAELAKEVARVAKEVGSPETARQARETAERLREELRRNREKKG

SEQ ID NO: 485 - protein, 200 aa, Artificial Sequence
  Synthetic
DPEEILERAKESLERAREASERGDEEEFRKAAEKALELAKRLVEQAKKEGDPELVLEAAKVALRVAELAAKNGDKEVFKKAAESALEVAKRLVEVASKEGDPELVLEAAKVALRVAELAAKNGDKEVFKKAAESALEVAKRLVEVASKEGDPELVEEAAKVAEEVRKLAKKQGDEEVYEKARETAREVKEELKRVREEKG

SEQ ID NO: 486 - protein, 148 aa, Artificial Sequence
  Synthetic
DSTKEKARQLAEEAKETAEKVGDPELIKLAEQASQEGDSEKAKAILLAAEAARVAKEVGDPELIKLALEAARRGDSEKAKAILLAAEAARVAKEVGDPELIKLALEAARRGDSEKARAILEAAERAREAKERGDPEQIKKARELAKRG

SEQ ID NO: 487 - protein, 200 aa, Artificial Sequence
  Synthetic
DAEEEAKEAIKRAQEAIELARKGNPEEARKVAEEARERAERVREEAEKRGDAEVLALVAIALALVAIALAEVGNPEEAREVAERAKEIAERVRELAEKRGDAEVLALVAIALALVAIALAEVGNPEEAREVAERAKEIAERVRELAEKRGDARVLKLVAKALELVAEALKKVGNPEEAREVEERAREIKERVRRLLEEKG

SEQ ID NO: 488 - protein, 220 aa, Artificial Sequence
  Synthetic
DSEADRIIKKLQKEIKEVEQEARDSNDDEERELLKRLAEALKRAAEAVKRAQESGDSEAIRIIKKLVKEITEVVREARKSTDKEEIELLIRLAEALARAAEAVADAAKSGDSEAIRIIKKLVKEITEVVREARKSTDKEEIELLIRLAEALARAAEAVADAAKSGDQEAIKRIKKLVKKIIEVVRKARKSTNKKEIEKLIRKAEKLARKAEQIAEDAKRG

SEQ ID NO: 489 - protein, 204 aa, Artificial Sequence
  Synthetic
DSEKEKATELAERAQDVASRVEEEARREGSRELIEIARELRERAEEASQEGDSEKAKAILLAAKAVLVAVEVYERAKRQGSDELREIARELAKEALRAAQEGDSEKAKAILLAAKAVLVAVEVYERAKRQGSDELREIARELAKEALRAAQEGDSEKARAILEAAREVLRAVEQYERAKRRGDDDERERAREEAREALERAREG

SEQ ID NO: 490 - protein, 220 aa, Artificial Sequence
  Synthetic
NPELEEWIRRAKEVAKEVEKVAQRAEEEGNPDLRDSAKELRRAVEEAIEEAKKQGNPELVEWVARAAKVAAEVIKVAIQAEKEGNRDLFRAALELVRAVIEAIEEAVKQGNPELVEWVARAAKVAAEVIKVAIQAEKEGNRDLFRAALELVRAVIEAIEEAVKQGNPELVERVARLAKKAAELIKRAIRAEKEGNRDERREALERVREVIERIEELVRQG

SEQ ID NO: 491 - protein, 204 aa, Artificial Sequence
  Synthetic
NSDEEEAREWAERAEEAAKEALEQAKREGDEDARRVAEELEKQAEEARRKKDSEEAEAVYWAARAVLAALEALEQAKREGDEDARRVAEELLRQAEEAARKKNSEEAEAVYWAARAVLAALEALEQAKREGDEDARRVAEELLRQAEEAARKKNPEEARAVYEAARDVLEALQRLEEAKRRGDEEERREAEERLRQAEERARKK

SEQ ID NO: 492 - protein, 204 aa, Artificial Sequence
  Synthetic
NSDEEEAREWAERAEEAAKEALEQAKREGDEDARRCAEELEKQAEEARRKKDSEEAEAVYWAARAVLAALEALEQAKREGDEDARRCAEELLRQACEAARKKNSEEAEAVYWAARAVLAALEALEQAKREGDEDARRCAEELLRQACEAARKKNPEEARAVYEAARDVLEALQRLEEAKRRGDEEERREAEERLRQACERARKK

SEQ ID NO: 493 - protein, 224 aa, Artificial Sequence
  Synthetic
SSDEEEARELIERAKEAAERAQEAAERTGDPRVRELARELKRLAQEAAEEVKRDPSSSDVNEALKLIVEAIEAAVRALEAAERTGDPEVRELARELVRLAVEAAEEVQRNPSSSDVNEALKLIVEAIEAAVRALEAAERTGDPEVRELARELVRLAVEAAEEVQRNPSSEEVNEALKKIVKAIQEAVESLREAEESGDPEKREKARERVREAVERAEEVQRDPS

SEQ ID NO: 494 - protein, 228 aa, Artificial Sequence
  Synthetic
NSEELERESEEAERRLQEARKRSEEARERGDLKELAEALIEEARAVQELARVASERGNSEEAERASEKAQRVLEEARKVSEEAREQGDDEVLALALIAIALAVLALAEVASSRGNSEEAERASEKAQRVLEEARKVSEEAREQGDDEVLALALIAIALAVLALAEVASSRGNKEEAERAYEDARRVEEEARKVKESAEEQGDSEVKRLAEEAEQLAREARRHVQETRG

SEQ ID NO: 495 - protein, 228 aa, Artificial Sequence
  Synthetic
NSEELERESEEAERRLQEARKRSEEARERGDLKELAEALIEEARAVQELARVACERGNSEEAERASEKAQRVLEEARKVSEEAREQGDDEVLALALIAIALAVLALAEVACCRGNSEEAERASEKAQRVLEEARKVSEEAREQGDDEVLALALIAIALAVLALAEVACCRGNKEEAERAYEDARRVEEEARKVKESAEEQGDSEVKRLAEEAEQLAREARRHVQECRG

SEQ ID NO: 496 - protein, 232 aa, Artificial Sequence
  Synthetic
NDEEVQEAVERAEELREEAEELIKKARKTGDPELLRKALEALEEAVRAVEEAIKRNPDNDEAVETAVRLARELKKVAEELQERAKKTGDPELLKLALRALEVAVRAVELAIKSNPDNDEAVETAVRLARELKKVAEELQERAKKTGDPELLKLALRALEVAVRAVELAIKSNPDNEEAVETAKRLAEELRKVAELLEERAKETGDPELQELAKRAKEVADRARELAKKSNPN

SEQ ID NO: 497 - protein, 232 aa, Artificial Sequence
  Synthetic
NDEEVQEACERAEELREEAEELIKKARKTGDPELLRKALEALEEAVRAVEEAIKRNPDNDECVETACRLARELKKVAEELQERAKKTGDPELLKLALRALEVAVRAVELAIKSNPDNDECVETACRLARELKKVAEELQERAKKTGDPELLKLALRALEVAVRAVELAIKSNPDNEECVETAKRLAEELRKVAELLEERAKETGDPELQELAKRAKEVADRARELAKKSNPN

SEQ ID NO: 498 - protein, 187 aa, Artificial Sequence
  Synthetic
MGCDQVAKDASSTIREVIEKNPNYSEKVADVAAKIVKKIIEGNPNGCDCVAKAASSIIRAVIEKNPNYSEVVADVAAAIVKAIIEGNPNGCDCVAKAASSIIRAVIEKNPNYSEVVADVAAAIVKAIIEGNPNGRDCVRKAASSIIRAVQEKNPNYSEVVEDVKRAIEKAIKEGNPNGWLEHHHHHH

SEQ ID NO: 499 - protein, 186 aa, Artificial Sequence
  Synthetic
MSDADEAAKEANKAENKARNRNDDEAAKAVKLIKEAIERAKKRNESDAVEAAKEAAKALNKALNRNDDEAAKAVALIAEAIIRALKRNESDAVEAAKEAAKALNKALNRNDDEAAKAVALIAEAIIRALKRNESDAVEKAKEAAKNLNKALNRNDDEQAKHVAKQAENIIRALKRNESWLEHHHHH

SEQ ID NO: 500 - protein, 179 aa, Artificial Sequence
  Synthetic
MSSEDTVRKIAQKCSEAIRESNDCEEAARKCAKTISEAIRESNSSELAVRIIAQVCSEAIRESNDCECAARICAKIISEAIRESNSSELAVRIIAQVCSEAIRESNDCECAARICAKIISEAIRESNSSELAKRIIKQVCSEAKRESNDTECAKRICTKIKSEAKRESNSWLEHHHHHH

SEQ ID NO: 501 - protein, 211 aa, Artificial Sequence
  Synthetic
MSYEDECEEKARRVAEKVERLKRSGTSEDEIAEEVAREISEVIRTLKESGSSYEVICECVARIVAEIVEALKRSGTSEDEIAEIVARVISEVIRTLKESGSSYEVICECVARIVAEIVEALKRSGTSEDEIAEIVARVISEVIRTLKESGSSYEVIKECVQRIVEEIVEALKRSGTSEDEINEIVRRVKSEVERTLKESGSSWLEHHHHHH

SEQ ID NO: 502 - protein, 210 aa, Artificial Sequence
  Synthetic
MSSEKEELRERLVKICVENAKRKGDDTEEAREAAREAFELVREAAERAGIDSSEVLELAIRLIKECVENAQREGYDISEACRAAAEAFKRVAEAAKRAGITSSEVLELAIRLIKECVENAQREGYDISEACRAAAEAFKRVAEAAKRAGITSSETLKRAIEEIRKRVEEAQREGNDISEACRQAAEEFRKKAEELKRRGDGWLEHHHHHH

SEQ ID NO: 503 - protein, 178 aa, Artificial Sequence
  Synthetic
MSEEKEEALKKVREAAKKLGSSDEEARKCFEEAREWAERTGSSAYEAAEALFKVLEAAYKLGSSAEEACECFNQAAEWAERTGSGAYEAAEALFKVLEAAYKLGSSAEEACECFNQAAEWAERTGSGAYEAAERLFEELERAYEEGSSAEEACEEFNKKEEEAHRKGKKWLEHHHHHH

SEQ ID NO: 504 - protein, 179 aa, Artificial Sequence
  Synthetic
MSTKEDARSTCEKAARKAAESNDEEVAKQAAKDCLEVAKQAGMPTKEAARSFCEAAARAAAESNDEEVAKIAAKACLEVAKQAGMPTKEAARSFCEAAARAAAESNDEEVAKIAAKACLEVAKQAGMPTKEAARSFCEAAKRAAKESNDEEVEKIAKKACKEVAKQAGMPWLEHHHHHH

SEQ ID NO: 505 - protein, 191 aa, Artificial Sequence
  Synthetic
MSDEMKKVMEALKKAVELAKKNNDDEVAREIERAAKEIVEALRENNSDEMAKVMLALAKAVLLAAKNNDDEVAREIARAAAEIVEALRENNSDEMAKVMLALAKAVLLAAKNNDDEVAREIARAAAEIVEALRENNSDEMAKKMLELAKRVLDAAKNNDDETAREIARQAAEEVEADRENNSWLEHHHHHH

SEQ ID NO: 506 - protein, 211 aa, Artificial Sequence
  Synthetic
MSYEDEAEEKARRVAEKVERLKRSGTSEDEIAEEVAREISEVIRTLKESGSSYEVIAEIVARIVAEIVEALKRSGTSEDEIAEIVARVISEVIRTLKESGSSYEVIAEIVARIVAEIVEALKRSGTSEDEIAEIVARVISEVIRTLKESGSSYEVIKEIVQRIVEEIVEALKRSGTSEDEINEIVRRVKSEVERTLKESGSSWLEHHHHHH

SEQ ID NO: 507 - protein, 210 aa, Artificial Sequence
  Synthetic
MSSEKEELRERLVKIVVENAKRKGDDTEEAREAAREAFELVREAAERAGIDSSEVLELAIRLIKEVVENAQREGYDISEAARAAAEAFKRVAEAAKRAGITSSEVLELAIRLIKEVVENAQREGYDISEAARAAAEAFKRVAEAAKRAGITSSETLKRAIEEIRKRVEEAQREGNDISEAARQAAEEFRKKAEELKRRGDGWLEHHHHHH

SEQ ID NO: 508 - protein, 187 aa, Artificial Sequence
  Synthetic
MSDADEAAKEANKAENKARNRNDDEAAKAVKLCKEAIERAKKRNESDAVEAAKEAAKALNKALNRNDDEAAKAVALCCEAIIRALKRNESDAVEAAKEAAKALNKALNRNDDEAAKAVALCCEAIIRALKRNESDAVEKAKEAAKNLNKALNRNDDEQAKHVAKQCENIIRALKRNESWLEHHHHHH

SEQ ID NO: 509 - protein, 156 aa, Artificial Sequence
  Synthetic
MDDEEQCREIAEKAKQTYTDDEEIARIIAEAARQTTTDDEEICRCIAEAAKQTYTDDEEIARIIAYAARQTTTDDEEICRCIAEAAKQTYTDDEEIARIIAYAARQTTTDDEEIERCIEEAAKQTYTDDEEIERIKEYARRQTTTDGWLEHHHHHH

SEQ ID NO: 510 - protein, 156 aa, Artificial Sequence
  Synthetic
MNAEDKAREVLKELKDEGSPEEEAARQVLKDLNREGSNAEDAARAVLKALKDEGSPEEEAARAVLKALNREGSNAEDAARAVLKALKDEGSPEEEAARAVLKALNREGSNEEDASRAVLKALKDEGSPEEEARRAVEKALNREGSNGWLEHHHHHH

SEQ ID NO: 511 - protein, 172 aa, Artificial Sequence
  Synthetic
MDSEEVNERVKQLAEKAKEATDKEEVIEIVKELAELAKQSTDSELVNEIVKQLAEVAKEATDKELVIYIVKILAELAKQSTDSELVNEIVKQLAEVAKEATDKELVIYIVKILAELAKQSTDSELVNEIVKQLEEVAKEATDKELVEHIEKILEELKKQSTDGWLEHHHHHH

SEQ ID NO: 512 - protein, 196 aa, Artificial Sequence
  Synthetic
MNDERQKQREEVRKLAEELASKATDEELIKEIKKCAQLAEELASRSTNDELIKQILEVAKLAFELASKATDEELIKEILKCCQLAFELASRSTNDELIKQILEVAKLAFELASKATDEELIKEILKCCQLAFELASRSTNDEEIKQILETAKEAFERASKATDEEEIKEILKKCQEKFEKKSRSTNGWLEHHHHHH

SEQ ID NO: 513 - protein, 188 aa, Artificial Sequence
  Synthetic
MNDKAKEAEELLRKALEKAEKENDETAIRCVELLKEALERAKKNNNDKAIEAVELLAKALEKALKENDETAIRCVCLLAEALLRALKNNNDKAIEAVELLAKALEKALKENDETAIRCVCLLAEALLRALKNNNDKAIEEVERLAKELEKALKENDETKIREVCERAEELLRRLKNNNGWLEHHHHHH

SEQ ID NO: 514 - protein, 228 aa, Artificial Sequence
  Synthetic
MSSEDAREKIEQLCREAKEIAERAKQQNSQEEAREAIEKLLRIAKRIAELAKQANQSEVAREAIECLCRIAKLIAELAKQANSQEVAREAIEALLRIAKLIAELAKQANQSEVAREAIECLCRIAKLIAELAKQANSQEVAREAIEALLRIAKLIAELAKQANQSEVAREAIECLSRIAKLIEELAKQANSQEVKREAQEALDRIQKLIEELQKQANQGWLEHHHHHH

SEQ ID NO: 515 - protein, 250 aa, Artificial Sequence
  Synthetic
MDIEKLCKKAESEAREARSKAEELRQRHPDSQAARDAQKLASQAEEAVKLACELAQEHPNADIAKLCIKAASEAAEAASKAAELAQRHPDSQAARDAIKLASQAAEAVKLACELAQEHPNADIAKLCIKAASEAAEAASKAAELAQRHPDSQAARDAIKLASQAAEAVKLACELAQEHPNADIAKKCIKAASEAAEEASKAAEEAQRHPDSQKARDEIKEASQKAEEVKERCERAQEHPNAWLEHHHHHH

SEQ ID NO: 516 - protein, 163 aa, Artificial Sequence
  Synthetic
MDEIEKVREEAEKLKKKTDDEDVLEVAREAIRAAKEATSDEILKVIKEALKLAKKTTDKDVLEVAREAIRAAEEATDDEILKVIKEALKLAKKTTDKDVLEVAREAIRAAEEATDEEILKEIKEALKKAKETTDTEELEKAREQIRKAEESTDGWLEHHHHHH

SEQ ID NO: 517 - protein, 163 aa, Artificial Sequence
  Synthetic
MSDIEEIRQLAEELRKKSDNEEVRKLAQEAAELAKRSTDSDVLEIVKDALELAKQSTNEEVIKLALKAAVLAAKSTDSDVLEIVKDALELAKQSTNEEVIKLALKAAVLAAKSTDEEVLEEVKEALRRAKESTDEEEIKEELRKAVEEAESTDGWLEHHHHHH

SEQ ID NO: 518 - protein, 163 aa, Artificial Sequence
  Synthetic
MSEKEKVEELAQRIREQLPDTELAREAQELADEARKSDDSEALKVVYLALRIVQQLPDTELAREALELAKEAVKSTDSEALKVVYLALRIVQQLPDTELAREALELAKEAVKSTDQEALKSVYEALQRVQDKPNTEEARESLERAKEDVKSTDGWLEHHHHHH

SEQ ID NO: 519 - protein, 171 aa, Artificial Sequence
  Synthetic
MDDAEELRERARDLLRKNGSSEEEIKKVDEELEKIVRKADSDDAVKLAVKAAALLAENGSSAEEIVKVLEELLKIVEKADSDDAVKLAVKAAALLAENGSSAEEIVKVLEELLKIVEKADSEEEVKDAVREAAELAERGSSAEEIRKQLKDRLRKVEESDSGWLEHHHHHH

SEQ ID NO: 520 - protein, 171 aa, Artificial Sequence
  Synthetic
MSDSEKLAKRVLKELKRRGTSDEELERMKRELEKIIKSATSSDAMRLALRVVLELVRRGTSSEILEKMMRMLIKIIQSATSSDAMRLALRVVLELVRRGTSSEILEKMMRMLIKIIQSATSDDQMREALRQVLEEVRKGTSSEQLERSMRKLIKEIKKRTSGWLEHHHHHH

SEQ ID NO: 521 - protein, 195 aa, Artificial Sequence
  Synthetic
MSEAEELARRAAKEAKELCKRSTDEELCKELKKLAELLKELAERYPDSEAAKLALKAALEAIELCKQSTDEELCEELVKLAQKLIELAKRYPDSEAAKLALKAALEAIELCKQSTDEELCEELVKLAQKLIELAKRYPDSEEAKRALKEAKELIEQCKESTDEDECRELVKRAEELIREAKENPDGWLEHHHHHH

SEQ ID NO: 522 - protein, 191 aa, Artificial Sequence
  Synthetic
MDERDKVRELIDRVEKELKREGTSEELIEEIRKVLKKAKEAADSDDDEAIKVAKEIVRVILELVREGTSSELIEEILKVLSLAAEAAKSTDDEAIKVAKEIVRVILELVREGTSSELIEEILKVLSLAAEAAKSTDEEAIKKAKEIVRRILELTREGTSEEEIREELKELRKKAQKAKSPEGWLEHHHHHH

SEQ ID NO: 523 - protein, 219 aa, Artificial Sequence
  Synthetic
MDECERLRQEVEKAEKELEKLAKQSTDEEVRQIAREVAKQLRRLAEEACRSNSDECLRLASEVVKAVQELVKLAEQATDEEVIRVALEVARELIRLAQEACRSNDDECLRLASEVVKAVQELVKLAEQATDEEVIRVALEVARELIRLAQEACRSNDEECLREASEVVKEVQELVKEAEKSTDEEEIRELLQRAEERIREAQERCREGDGWLEHHHHHH

SEQ ID NO: 524 - protein, 227 aa, Artificial Sequence
  Synthetic
MTRQKEQLDEVLEEIQRLAEEARKLMTDEEEAKKIQEEAERAKEMLRRAVEKVTDNEVIEKLLEVVKEIIRLAEEAMKKMTDEEEAAKIAKEALEAIKMLARAVEEVTDNEVIEKLLEVVKEIIRLAEEAMKKMTDEEEAAKIAKEALEAIKMLARAVEEVTDKERIEQLLREVKEEIRRAEEESRKETDDEEAAKRAREALRRIRERAREVEEDKSGWLEHHHHHH

SEQ ID NO: 525 - protein, 231 aa, Artificial Sequence
  Synthetic
MDEEVQRIREEVRRAIEEVRESLERNDSEEAEELAREALERVAEEVKESIKERPDRDLAIEAIRALVRLAIEIVRLALEQNDSELAREVAEEALRAVAEVVKEAIRQRGDRDLAIEAIRALVRLAIEIVRLALEQNDSELAREVAEEALRAVAEVVKEAIRQRGDRELAKEAIRALRRLAEEIRRLAEEQNDDELAREVEELAREAIEEVRKELERQRPGRGWLEHHHHHH

SEQ ID NO: 526 - protein, 223 aa, Artificial Sequence
  Synthetic
MSEVEESAQEVEKRAQEVREEAERRGTSQEVLDEIKRVVDEARQLAQRAKESDDSEVAESALQVVREALKVVLSALERGTSEEVLKEILRVVSEAIKLALEAIKSSDSEVAESALQVVREALKVVLSALERGTSEEVLKEILRVVSEAIKLALEAIKSSDSETARRALEKVRESLKEVLEQLERGTSEEELRESLREVSENIRKALEEIKSPDGWLEHHHHHH

SEQ ID NO: 527 - protein, 231 aa, Artificial Sequence
  Synthetic
MSTVKELLDRARELMRELAERASEQGSDEEEARKLLEDLEQLVQEIRRELEETGTSSEVIRLIAKAIMLMAELALRAAEQGSDAEEAMKLLKDLLRLVLEILRELRETGTDSEVIRLIAKAIMLMAELALRAAEQGSDAEEAMKLLKDLLRLVLEILRELRETGTDKEEIRKVAEEIMRRAKTALDEARQGSDAEEAMKRLKEQLRRILERLREEREKGTDGWLEHHHHHH

SEQ ID NO: 528 - protein, 175 aa, Artificial Sequence
  Synthetic
MDSYTERARKAVKRYVKEEGGSEEEAEREAEKVREEIRKKASDSYLIQAAAAVVAYVIEEGGSPEEAVKIAEEVVRRIKEKADDSYLIQAAAAVVAYVIEEGGSPEEAVKIAEEVVRRIKEKADDRELIRRAAERVAEVIERGGSPEEAVKEAEKEVKKQKEESDGWLEHHHHHH

SEQ ID NO: 529 - protein, 175 aa, Artificial Sequence
  Synthetic
MSIQEKAKQSVIRKVKEEGGSEEEARERAKEVEERLKKEADDSTLVRAAAAVVLYVLEKGGSTEEAVQRAREVIERLKKEASDSTLVRAAAAVVLYVLEKGGSTEEAVQRAREVIERLKKEASDEELIREAAKEVLKVLEEGGSVEEAVERARERIEELQKRSDDGWLEHHHHHH

SEQ ID NO: 530 - protein, 175 aa, Artificial Sequence
  Synthetic
MSETEEVKKLVEEKVKKEGGSPEEAKETAKEVTEELKEESQDSTLLKVAALVASAVLKEGGSPEEAAETAKEVVKELRKSASDSTLLKVAALVASAVLKEGGSPEEAAETAKEVVKELRKSASDEELLKEAARQAEESLRQGKSPEEAAEEAKKEVKKLKEKSQDGWLEHHHHHH

SEQ ID NO: 531 - protein, 175 aa, Artificial Sequence
  Synthetic
MSETEEVKKLCEEKVKKEGGSPEEAKETAKEVTEELKEESQDSTLLKVAALCASAVLKEGGSCEEAAETAKEVVKELRKSASDSTLLKVAALCASAVLKEGGSCEEAAETAKEVVKELRKSASDEELLKEAARQAEESLRQGKSCEEAAEEAKKEVKKLKEKSQDGWLEHHHHHH

SEQ ID NO: 532 - protein, 175 aa, Artificial Sequence
  Synthetic
MSEEDEVAKQASRYAKEQGGDPEKSREEAEKALEEVKKQATSSEALQVALEAARYASEEGEDPAEALKEAARALEEVRRSATSSEALQVALEAARYASEEGEDPAEALKEAARALEEVRRSATSEEDLKEALDRAREASERGQNPAESLKEAAEELKKKKEKSSDGWLEHHHHHH

SEQ ID NO: 533 - protein, 175 aa, Artificial Sequence
  Synthetic
MSDLEKALKRFVKEEKKKGRNPEEAKKEAKKLKKKLKKSAGSSDLLTALAKFVLEEVRKGRNPEEAVKEAIKLAEKLKRSAGSSDLLTALAKFVLEEVRKGRNPEEAVKEAIKLAEKLKRSAGSSEQLEKLATKVLEEVKKGRNPKRAVEEAIKQAKEDRKRSNSGWLEHHHHHH

SEQ ID NO: 534 - protein, 175 aa, Artificial Sequence
  Synthetic
MSSTERAAQSVKKYLQQQGKDPDQAQKKAQEVKENIEKEANSSSVIRAAAAVVFYLLEQGYDPDQALKKAQEVARNIENEANSSSVIRAAAAVVFYLLEQGYDPDQALKKAQEVARNIENEANSDDVIKEAAKVVYKRLEEGQDPDKALEEARKRAQKTEKKTTSGWLEHHHHHH

SEQ ID NO: 535 - protein, 175 aa, Artificial Sequence
  Synthetic
MSSTERAAQSCKKYLQQQGKDPDQAQKKAQEVKENIEKEANSSSVIRAAAACVFYLLEQGYDCDQALKKAQEVARNIENEANSSSVIRAAAACVFYLLEQGYDCDQALKKAQEVARNIENEANSDDVIKEAAKVVYKRLEEGQDCDKALEEARKRAQKTEKKTTSGWLEHHHHHH

SEQ ID NO: 536 - protein, 179 aa, Artificial Sequence
  Synthetic
MSDLQEVADRIVEQLKREGRSPEEARKEARRLIEEIKQSAGGDSELIEVAVRIVKELEEQGRSPSEAAKEAVELIERIRRAAGGDSELIEVAVRIVKELEEQGRSPSEAAKEAVELIERIRRAAGGDSDRIKKAVELVRELEERGRSPSEAARRAVEEIQRSVEEDGGNGWLEHHHHHH

SEQ ID NO: 537 - protein, 183 aa, Artificial Sequence
  Synthetic
MSESDEVAKRISKEAKKEGRSEEEVKELVERFREAIEKLKEQGDSEAIRVAVEIADEALREGLSPEEVVELVERFVQAIQKLQENGESEAIRVAVEIADEALREGLSPEEVVELVERFVQAIQKLQENGEEDEIQKAVETAQEQLEEGRSPKEVVETVEEQVKEVEEKQQKGEGWLEHHHHHH

SEQ ID NO: 538 - protein, 239 aa, Artificial Sequence
  Synthetic
MSDIEKAKRIADRAIDVVRKAAEKEGGSPEKIREALQQAKRCAEKLIRLVKEAQESNSSDVREAARVALEAVRVVVRAAEEKGGSPEEVVEAVCRAVRCAEKLIRLVKRAEESNSSDVREAARVALEAVRVVVRAAEEKGGSPEEVVEAVCRAVRCAEKLIRLVKRAEESNSENVRESARRALEKVLKTVQQAEEEGKSPEEVVEQVCRSVRKAEEQIRETQERERSTSGWLEHHHHHH

SEQ ID NO: 539 - protein, 239 aa, Artificial Sequence
  Synthetic
MSDAEEVKKQAEEIANRAYKTAQKQGESDSRAKKAEKLVRKAAEKLARLIERAQKEGDSDALEVARQALEIARRAFETAKKQGHSATEAAKAFVDVVEAAISLAELIISAKRQGDSDALEVARQALEIARRAFETAKKQGHSATEAAKAFVDVVEAAISLAELIISAKRQGDQKALEIARKALQKAKENFEEAQKRGESATQAAKRFVDTVEKEIKKAQEQIKRERKGDGWLEHHHHHH

SEQ ID NO: 540 - protein, 239 aa, Artificial Sequence
  Synthetic
MSKEEELIEKARRVAKEAIEEAKRQGKDPSEAKKAAEKLIKAVEEAVKEAKRLKEEGNSELAELISEAIQVAVEAVEEAVRQGKDPFKAAEAAAELIRAVVEAVKEAERLKREGNSELAELISEAIQVAVEAVEEAVRQGKDPFKAAEAAAELIRAVVEAVKEAERLKREGNSELAKKINDTIREAVREVQQAVEDGKDPFEAAREAAEKIRESVERVREEEEKKRRGNGWLEHHHHHH

SEQ ID NO: 541 - protein, 151 aa, Artificial Sequence
  Synthetic
MSNEQEKKDLKKAEEAAKSPDPELIREAIERAEESGSNKAKEIILRAAEEAAKSPDPELIRLAIEAAERSGSNKAKEIILRAAEEAAKSPDPELIRLAIEAAERSGSEKAKEIIKRAAEEAQKSPDPELQKLAKEARERLGGWLEHHHHHH

SEQ ID NO: 542 - protein, 151 aa, Artificial Sequence
  Synthetic
MSSEEEELEKDAREASESGADPEWLREIVDLARESGDSEVIELAKRALEAAKSGADPEWLLRIVRQAEESGSSEVIELAKRALEAAKSGADPEWLLRIVRQAEESGSEEVIELAKRALEEAKKGKDPKELLEEVRKREESGGWLEHHHHHH

SEQ ID NO: 543 - protein, 167 aa, Artificial Sequence
  Synthetic
MSTKEEKERIERIEKEVRSPDPENIREAVRKAEELLRENPSTEAEELLRRAIEAAVRAPDPEAIREAVRAAEELLRENPSTEAEELLRRAIEAAVRAPDPEAIREAVRAAEELLRENPSEEAKELLRRAIESAKKAPDPEAQREAKRAEEELRKEDPGWLEHHHHHH

SEQ ID NO: 544 - protein, 167 aa, Artificial Sequence
  Synthetic
MSTKEEKERIERIEKEVRSPDCENIREAVRKAEELLRENPSTEAEELLRRAIEAAVRCPDCEAIREAVRAAEELLRENPSTEAEELLRRAIEAAVRCPDCEAIREAVRAAEELLRENPSEEAKELLRRAIESAKKCPDPEAQREAKRAEEELRKEDPGWLEHHHHHH

SEQ ID NO: 545 - protein, 171 aa, Artificial Sequence
  Synthetic
MNSREEEEAKRIVKEAKKSGFDPEEVEKALREVIRVAEETGNSEALKEALKIVEEAAKSGYDPAEVAKALAEVIRVAEETGNSEALKEALKIVEEAAKSGYDPAEVAKALAEVIRVAEETGNPEELKEALKRVLEAAKRGEDPAQVAKELAEEIRRNQEEGGWLEHHHHHH

SEQ ID NO: 546 - protein, 171 aa, Artificial Sequence
  Synthetic
MDSEEEQERIRRILKEARKSGTEESLRQAIEDVAQLAKKSQDSEVLEEAIRVILRIAKESGSEEALRQAIRAVAEIAKEAQDSEVLEEAIRVILRIAKESGSEEALRQAIRAVAEIAKEAQDPRVLEEAIRVIRQIAEESGSEEARRQAERAEEEIRRRAQGWLEHHHHHH

SEQ ID NO: 547 - protein, 183 aa, Artificial Sequence
  Synthetic
MDPEEVRREVERATEEYRKNPGSDEAREQLKEAVERAEEAARSPDPEAVQVAVEAATQIYENTPGSEEAKKALEIAVRAAENAARLPDPEAVQVAVEAATQIYENTPGSEEAKKALEIAVRAAENAARLPDPEAVRVAEEAADQIRKNTPGSELAKRADEIKKRARELLERLPGWLEHHHHHH

SEQ ID NO: 548 - protein, 183 aa, Artificial Sequence
  Synthetic
MQSEDRKEKIRELERKARENTGSDEARQAVKEIARIAKEALEEGNADTAKEAIQRLEDLARDYSGSDVASLAVKAIAKIAETALRNGYADTAKEAIQRLEDLARDYSGSDVASLAVKAIAKIAETALRNGYKETAEEAIKRLRELAEDYKGSEVAKLAEEAIERIEKVSRERGGWLEHHHHHH

SEQ ID NO: 549 - protein, 183 aa, Artificial Sequence
  Synthetic
MQCEDRKEKIRELERKARENTGSDEARQAVKEIARIAKEALEEGCCDTAKEAIQRLEDLARDYSGSDVASLAVKAIAKIAETALRNGCCDTAKEAIQRLEDLARDYSGSDVASLAVKAIAKIAETALRNGCKETAEEAIKRLRELAEDYKGSEVAKLAEEAIERIEKVSRERGGWLEHHHHHH

SEQ ID NO: 550 - protein, 183 aa, Artificial Sequence
  Synthetic
MSNDEKEKLKELLKRAEELAKSPDPEDLKEAVRLAEEVVRERPGSNLAKKALEIILRAAEELAKLPDPEALKEAVKAAEKVVREQPGSNLAKKALEIILRAAEELAKLPDPEALKEAVKAAEKVVREQPGSELAKKALEIIERAAEELKKSPDPEAQKEAKKAEQKVREERPGGWLEHHHHHH

SEQ ID NO: 551 - protein, 183 aa, Artificial Sequence
  Synthetic
MTTEDERRELEKVARKAIEAAREGNTDEVREQLQRALEIARESGTTEAVKLALEVVARVAIEAARRGNTDAVREALEVALEIARESGTTEAVKLALEVVARVAIEAARRGNTDAVREALEVALEIARESGTEEAVRLALEVVKRVSDEAKKQGNEDAVKEAEEVRKKIEEESGGWLEHHHHHH

SEQ ID NO: 552 - protein, 195 aa, Artificial Sequence
  Synthetic
MSSVAEEIEKRAKKISKELKKEGKNPEWIEELQRAADKLVEVARRATSSDALEIAKRAVKIAEELAKQGSNPKWIAELLKAAAKLVEVAARATSSDALEIAKRAVKIAEELAKQGSNPKWIAELLKAAAKLVEVAARATSPKALKQAKEAVKEAEELAKKGRNPKEIAEELKKRAKEVEKLARSTGWLEHHHHHH

SEQ ID NO: 553 - protein, 195 aa, Artificial Sequence
  Synthetic
MSSVAEEIEKRCKKISKELKKEGKNPEWIEELQRACDKLVEVARRATSSDALEIAKRCVKIAEELAKQGSNPKWIAELLKACAKLVEVAARATSSDALEIAKRCVKIAEELAKQGSNPKWIAELLKACAKLVEVAARATSPKALKQAKECVKEAEELAKKGRNPKEIAEELKKCAKEVEKLARSTGWLEHHHHHH

SEQ ID NO: 554 - protein, 199 aa, Artificial Sequence
  Synthetic
MSTEELKKVLERVRELSERAKESTDPEEALKIAKEVIELALKAVKEDPSTDALRAVLEAVRLASEVAKRVTDPDKALKIAKLVIELALEAVKEDPSTDALRAVLEAVRLASEVAKRVTDPDKALKIAKLVIELALEAVKEDPSEEAKRAVEEAKRLAEEVSKRVTDPELSEKIRQLVKELEEEAQKEDPGWLEHHHHHH

SEQ ID NO: 555 - protein, 199 aa, Artificial Sequence
  Synthetic
MSTEELKKVLERVRELCERAKESTDPEEALKIAKEVIELALKAVKEDPSTDALRAVLEAVRCACEVAKRVTDPDKALKIAKLVIELALEAVKEDPSTDALRAVLEAVRCACEVAKRVTDPDKALKIAKLVIELALEAVKEDPSEEAKRAVEEAKRCAEEVSKRVTDPELSEKIRQLVKELEEEAQKEDPGWLEHHHHHH

SEQ ID NO: 556 - protein, 203 aa, Artificial Sequence
  Synthetic
MKTEVEKKAKEVIKEAKELAKELDSEEAKKVVERIKEAAEAAKRAAEQGKTEVAKLALKVLEEAIELAKENRSEEALKVVLEIARAALAAAQAAEEGKTEVAKLALKVLEEAIELAKENRSEEALKVVLEIARAALAAAQAAEEGKSDEARDALRRLEEAIEEAKENRSKESLEKVREEAKEAEQQAEDAREGGWLEHHHHHH

SEQ ID NO: 557 - protein, 143 aa, Artificial Sequence
  Synthetic
MTDIKKKAEEIIKEAKKQGSEDAIRLAQEAKKQGTDILVRAAEIVVRAQEQGSEDAIRLAKEASREGTDILVRAAEIVVRAQEQGSEDAIRLAKEASREGTPTLVKAAEKVVRAQQKGSQDTIEKAKEESREGGWLEHHHHHH

SEQ ID NO: 558 - protein, 143 aa, Artificial Sequence
  Synthetic
MTDIKKKAEEIIKEAKKQGSEDAIRLAQECKKQGTDICVRAAEIVVRAQEQGSEDAIRLAKECSREGTDICVRAAEIVVRAQEQGSEDAIRLAKECSREGTPTCVKAAEKVVRAQQKGSQDTIEKAKEESREGGWLEHHHHHH

SEQ ID NO: 559 - protein, 183 aa, Artificial Sequence
  Synthetic
MDNDEKRKRAEKALQRAQEAEKKGDVEEAVRAAQEAVRAAKESGDNDVLRKVAEQALRIAKEAEKQGNVEVAVKAARVAVEAAKQAGDNDVLRKVAEQALRIAKEAEKQGNVEVAVKAARVAVEAAKQAGDQDVLRKVSEQAERISKEAKKQGNSEVSEEARKVADEAKKQTGGWLEHHHHHH

SEQ ID NO: 560 - protein, 227 aa, Artificial Sequence
  Synthetic
MDPDEDRERLKEELKKIREALREAKEKPDPEEIKRALREVLEAIRRILKLAERAGDPDLAREALKEINKVIREALEIAKRVPDPEVIKEALRVVLEAIRAILKLAEQAGDPDLAREALKEINKVIREALEIAKRVPDPEVIKEALRVVLEAIRAILKLAEQAGDPDLAREALEEIDKVIDEAQEISERVPDEEVQREAQEVIKEADRARKKLSEQSGGWLEHHHHHH

SEQ ID NO: 561 - protein, 239 aa, Artificial Sequence
  Synthetic
MDPEDELKRVEKLVKEAEELLRQAKEKGSEEDLEKALRTAEEAAREAKKVLEQAEKEGDPEVALRAVELVVRVAELLLRIAKESGSEEALERALRVAEEAARLAKRVLELAEKQGDPEVALRAVELVVRVAELLLRIAKESGSEEALERALRVAEEAARLAKRVLELAEKQGDPEVARRAVELVKRVAELLERIARESGSEEAKERAERVREEARELQERVKELREREGGWLEHHHHHH

SEQ ID NO: 562 - protein, 239 aa, Artificial Sequence
  Synthetic
MDPEDELKRVEKLVKEAEELLRQCKEKGSEECLEKALRTAEEAAREAKKVLEQAEKEGDPEVALRAVELVVRVAELLLRICKESGSEECLERALRVAEEAARLAKRVLELAEKQGDPEVALRAVELVVRVAELLLRICKESGSEECLERALRVAEEAARLAKRVLELAEKQGDPEVARRAVELVKRVAELLERICRESGSEECKERAERVREEARELQERVKELREREGGWLEHHHHHH

SEQ ID NO: 563 - protein, 227 aa, Artificial Sequence
  Synthetic
MTSDDDKVREAEERVREAIERIQRALKKRDTPDARKALEAAKKLLKVVEKAKKRGTSDAIKVAEAAARVAEAIARILEALNERDTPDARKALRAAIKLAEVVYKAAESGTSDAIKVAEAAARVAEAIARILEALNERDTPDARKALRAAIKLAEVVYKAAESGTTEALKVAEKAARVAEKIARILEKLNERDTPEARKKLRQAIKEAEKVYKESEQGGWLEHHHHHH

SEQ ID NO: 564 - protein, 251 aa, Artificial Sequence
  Synthetic
MTSEIDKLIKKLRQTAKEVKREAEERKRRSTDPTVREVIERLAQLALDVAEEAARLIKKATTSEVAKLVWKLARTAIEVIREAIERAERSTDPEVIRVILELARLAAEVAKEAARLIVKATTSEVAKLVWKLARTAIEVIREAIERAERSTDPEVIRVILELARLAAEVAKEAARLIVKATTEEVAKKVWKEAYRAIEEIRKAIEKAERSTDPNEIKKILEEARKKAEEAIERAKEIVKSTGWLEHHHHHH

SEQ ID NO: 565 - protein, 255 aa, Artificial Sequence
  Synthetic
MTPRERLEEAKERVEEIRELIDKARKLQEQGNKEEAEKVLREAREQIREVTRELEEIAKNSDTPELALRAAELLVRLIKLLIEIAKLLQEQGNKEEAEKVLREATELIKRVTELLEKIAKNSDTPELALRAAELLVRLIKLLIEIAKLLQEQGNKEEAEKVLREATELIKRVTELLEKIAKNSDTPELAKRAAELLKRLIELLKEIAKLLEEEGNEDEAEKVKEEAKELEERVRELEERIRKNSDGWLEHHHHHH

SEQ ID NO: 566 - protein, 259 aa, Artificial Sequence
  Synthetic
MNPQEDLERAEKVVRSVEEVLQRAKEAQREGDKEKVERLIKEAENQIRKARELLERVVRQNPDDPEVLLRVAELIVRLVEVVLELAKLAEKNGDKEQVERLIQTAEELIREARELLERVSREIPDNPEVLLRVAELIVRLVEVVLELAKLAEKNGDKEQVERLIQTAEELIREARELLERVSREIPDNPESLKRVAELIKRLVKVVDELSKLAERNGDRDQVERLRQLAEELRREAEELEERVRRERPDGWLEHHHHHH

SEQ ID NO: 567 - protein, 211 aa, Artificial Sequence
  Synthetic
MSTEEKIEEARQSIKEAERSLREGNPEKAREDVRRALELVRELEKLARKTGSTEVLIEAARLAIEVARVALKVGSPETAREAVRTALELVQELERQARKTGSTEVLIEAARLAIEVARVALKVGSPETAREAVRTALELVQELERQARKTGSDEVLKRAAELAKEVARVAKEVGSPETARQARETAERLREELRRNREKKGGWLEHHHHHH

SEQ ID NO: 568 - protein, 211 aa, Artificial Sequence
  Synthetic
MDPEEILERAKESLERAREASERGDEEEFRKAAEKALELAKRLVEQAKKEGDPELVLEAAKVALRVAELAAKNGDKEVFKKAAESALEVAKRLVEVASKEGDPELVLEAAKVALRVAELAAKNGDKEVFKKAAESALEVAKRLVEVASKEGDPELVEEAAKVAEEVRKLAKKQGDEEVYEKARETAREVKEELKRVREEKGGWLEHHHHHH

SEQ ID NO: 569 - protein, 159 aa, Artificial Sequence
  Synthetic
MDSTKEKARQLAEEAKETAEKVGDPELIKLAEQASQEGDSEKAKAILLAAEAARVAKEVGDPELIKLALEAARRGDSEKAKAILLAAEAARVAKEVGDPELIKLALEAARRGDSEKARAILEAAERAREAKERGDPEQIKKARELAKRGGWLEHHHHHH

SEQ ID NO: 570 - protein, 211 aa, Artificial Sequence
  Synthetic
MDAEEEAKEAIKRAQEAIELARKGNPEEARKVAEEARERAERVREEAEKRGDAEVLALVAIALALVAIALAEVGNPEEAREVAERAKEIAERVRELAEKRGDAEVLALVAIALALVAIALAEVGNPEEAREVAERAKEIAERVRELAEKRGDARVLKLVAKALELVAEALKKVGNPEEAREVEERAREIKERVRRLLEEKGGWLEHHHHHH

SEQ ID NO: 571 - protein, 231 aa, Artificial Sequence
  Synthetic
MDSEADRIIKKLQKEIKEVEQEARDSNDDEERELLKRLAEALKRAAEAVKRAQESGDSEAIRIIKKLVKEITEVVREARKSTDKEEIELLIRLAEALARAAEAVADAAKSGDSEAIRIIKKLVKEITEVVREARKSTDKEEIELLIRLAEALARAAEAVADAAKSGDQEAIKRIKKLVKKIIEVVRKARKSTNKKEIEKLIRKAEKLARKAEQIAEDAKRGGWLEHHHHHH

SEQ ID NO: 572 - protein, 215 aa, Artificial Sequence
  Synthetic
MDSEKEKATELAERAQDVASRVEEEARREGSRELIEIARELRERAEEASQEGDSEKAKAILLAAKAVLVAVEVYERAKRQGSDELREIARELAKEALRAAQEGDSEKAKAILLAAKAVLVAVEVYERAKRQGSDELREIARELAKEALRAAQEGDSEKARAILEAAREVLRAVEQYERAKRRGDDDERERAREEAREALERAREGGWLEHHHHHH

SEQ ID NO: 573 - protein, 231 aa, Artificial Sequence
  Synthetic
MNPELEEWIRRAKEVAKEVEKVAQRAEEEGNPDLRDSAKELRRAVEEAIEEAKKQGNPELVEWVARAAKVAAEVIKVAIQAEKEGNRDLFRAALELVRAVIEAIEEAVKQGNPELVEWVARAAKVAAEVIKVAIQAEKEGNRDLFRAALELVRAVIEAIEEAVKQGNPELVERVARLAKKAAELIKRAIRAEKEGNRDERREALERVREVIERIEELVRQGGWLEHHHHHH

SEQ ID NO: 574 - protein, 215 aa, Artificial Sequence
  Synthetic
MNSDEEEAREWAERAEEAAKEALEQAKREGDEDARRVAEELEKQAEEARRKKDSEEAEAVYWAARAVLAALEALEQAKREGDEDARRVAEELLRQAEEAARKKNSEEAEAVYWAARAVLAALEALEQAKREGDEDARRVAEELLRQAEEAARKKNPEEARAVYEAARDVLEALQRLEEAKRRGDEEERREAEERLRQAEERARKKGWLEHHHHHH

SEQ ID NO: 575 - protein, 215 aa, Artificial Sequence
  Synthetic
MNSDEEEAREWAERAEEAAKEALEQAKREGDEDARRCAEELEKQAEEARRKKDSEEAEAVYWAARAVLAALEALEQAKREGDEDARRCAEELLRQACEAARKKNSEEAEAVYWAARAVLAALEALEQAKREGDEDARRCAEELLRQACEAARKKNPEEARAVYEAARDVLEALQRLEEAKRRGDEEERREAEERLRQACERARKKGWLEHHHHHH

SEQ ID NO: 576 - protein, 235 aa, Artificial Sequence
  Synthetic
MSSDEEEARELIERAKEAAERAQEAAERTGDPRVRELARELKRLAQEAAEEVKRDPSSSDVNEALKLIVEAIEAAVRALEAAERTGDPEVRELARELVRLAVEAAEEVQRNPSSSDVNEALKLIVEAIEAAVRALEAAERTGDPEVRELARELVRLAVEAAEEVQRNPSSEEVNEALKKIVKAIQEAVESLREAEESGDPEKREKARERVREAVERAEEVQRDPSGWLEHHHHHH

SEQ ID NO: 577 - protein, 239 aa, Artificial Sequence
  Synthetic
MNSEELERESEEAERRLQEARKRSEEARERGDLKELAEALIEEARAVQELARVASERGNSEEAERASEKAQRVLEEARKVSEEAREQGDDEVLALALIAIALAVLALAEVASSRGNSEEAERASEKAQRVLEEARKVSEEAREQGDDEVLALALIAIALAVLALAEVASSRGNKEEAERAYEDARRVEEEARKVKESAEEQGDSEVKRLAEEAEQLAREARRHVQETRGGWLEHHHHHH

SEQ ID NO: 578 - protein, 239 aa, Artificial Sequence
  Synthetic
MNSEELERESEEAERRLQEARKRSEEARERGDLKELAEALIEEARAVQELARVACERGNSEEAERASEKAQRVLEEARKVSEEAREQGDDEVLALALIAIALAVLALAEVACCRGNSEEAERASEKAQRVLEEARKVSEEAREQGDDEVLALALIAIALAVLALAEVACCRGNKEEAERAYEDARRVEEEARKVKESAEEQGDSEVKRLAEEAEQLAREARRHVQECRGGWLEHHHHHH

SEQ ID NO: 579 - protein, 243 aa, Artificial Sequence
  Synthetic
MNDEEVQEAVERAEELREEAEELIKKARKTGDPELLRKALEALEEAVRAVEEAIKRNPDNDEAVETAVRLARELKKVAEELQERAKKTGDPELLKLALRALEVAVRAVELAIKSNPDNDEAVETAVRLARELKKVAEELQERAKKTGDPELLKLALRALEVAVRAVELAIKSNPDNEEAVETAKRLAEELRKVAELLEERAKETGDPELQELAKRAKEVADRARELAKKSNPNGWLEHHHHHH

SEQ ID NO: 580 - protein, 243 aa, Artificial Sequence
  Synthetic
MNDEEVQEACERAEELREEAEELIKKARKTGDPELLRKALEALEEAVRAVEEAIKRNPDNDECVETACRLARELKKVAEELQERAKKTGDPELLKLALRALEVAVRAVELAIKSNPDNDECVETACRLARELKKVAEELQERAKKTGDPELLKLALRALEVAVRAVELAIKSNPDNEECVETAKRLAEELRKVAELLEERAKETGDPELQELAKRAKEVADRARELAKKSNPNGWLEHHHHHH

SEQ ID NO: 581 - protein, 100 aa, Artificial Sequence
  Synthetic
NEAQEILDEAREQARENKKKADEEGDEELDKLAKELEKVVDEVEEASKELDSAEAAKILAEAAKRAVENEDRAQKNGNEDDARNAKELARVVAQVANAAS

SEQ ID NO: 582 - protein, 100 aa, Artificial Sequence
  Synthetic
NDAEEILDEAREQARRNKEKADREGNEEDARLAEELEKVVREVREASRELDSAEAAKILAEAAKRAVENFDRAQKNGNEDDARNAKELARVVAQVANAAS

SEQ ID NO: 583 - protein, 100 aa, Artificial Sequence
  Synthetic
SKAQELLERAREEAERLKEEAKKRGDKETLKLAEELREVVQRVEEAAKELDDSDAARLLAQAALEAVQLALEASERGDKETLRRAVELAEVVARVAEAAS

SEQ ID NO: 584 - protein, 100 aa, Artificial Sequence
  Synthetic
SEARELLEEARKRAEDLEEQAEREGDEEKRRRARDLREVVERVREAAERLDDSEAARLLAEAALRAVRLAEEASRQGDEEKLREAVKLAEVVARVAEAAS

SEQ ID NO: 585 - protein, 100 aa, Artificial Sequence
  Synthetic
SEAEELLREAEERAQRLEEEAKRRGDEETLRLAQELREVVERVREASRELDDSEAAKLLAEAALRAVQLAEEASRRGDEETLREAVKLAEVVARVAEAAS

SEQ ID NO: 586 - protein, 100 aa, Artificial Sequence
  Synthetic
SKARELLERARELAERLAKEAKERGDEETLERAEDLREVVERVREAAERLDDSDAARLLARAALEAVRLAVEASRRGDEETLREAVKLAEVVARVAEAAS

SEQ ID NO: 587 - protein, 100 aa, Artificial Sequence
  Synthetic
NRADKILKEAEERAERLKEKADRRGNDERKEKAERLKEVVERVRRAAKKLENNRAAEILAEAALRAVQLFEKASREGNDERAEKALRLAEVVARVAEAAS

SEQ ID NO: 588 - protein, 95 aa, Artificial Sequence
  Synthetic
SEAELLEEARERAERLKEAREGDEETLRLAEELREVVERVREAAKELDDSEAALLAEAALRAVQLAEEASRRGDEETLREAVLAEVVARVAEAAS
